(19) United States
(12) Patent Application Publication
(10) Pub. No.: US 2018/0187190 A1
(43) Pub. Date: Jul. 5, 2018

(54) NEW CRISPR ASSAYS

(71) Applicant: Erasmus University Medical Center Rotterdam, Rotterdam (NL)

(72) Inventor: Rogier Petrus Leonardus LOUWEN, Rotterdam (NL)

(73) Assignee: Erasmus University Medical Center Rotterdam, Rotterdam (NL)

(21) Appl. No.: 15/735,941

(22) PCT Filed: Jun. 10, 2016
(86) PCT No.: PCT/NL2016/050422

§ 371 Date: Dec. 12, 2017

(30) Foreign Application Priority Data
Jun. 12, 2015 (NL) PCT/NL2015/050438

(51) Int. Cl. C12N 15/113; G01N 33/50; C12N 15/85

(52) U.S. Cl. CPC C12N 15/113; G01N 33/5023; C12N 2310/14; C12N 2310/20; C12N 15/85

(57) ABSTRACT

The present invention relates to expression vectors harboring eukaryotic CRISPR sequences and their use in assays to study the intervention of eukaryotic CRISPR sequences with gene regulation and with gene editing in eukaryotes using CRISPR-Cas technology.

[0001] The invention relates to the field of genetics, more particular human genetics, more especially the use of eukaryotic CRISPR sequences in assays to study eukaryotic gene regulation through RNAi and in assays for studying the behavior of eukaryotic CRISPR sequences.

### INTRODUCTION

[0002] CRISPR Sequences are Clustered Regularly Interspaced Short

[0003] Palindromic Repeat sequences that are present in bacteria and archaea. Initially these kind of sequences have been indicated as Short Regularly Spaced Repeats (SRSRs) (Mojica, F. J. et al., 2000, Mol. Microbiol. 36:244-246), but they have been renamed in the acronym CRISPR by Jansen et al. (Jansen, R. et al., 2002, Mol. Microbiol. 43:1565-1575). Their function has been revealed later by Doudna and Charpentier, who independently from each other showed that CRISPR sequences work together with proteins from the Cas (CRISP associated) group to form a kind of immune reaction against viral infections (Pennisi, E., 2013, Science 341:833-836).

[0004] Together with Doudna and Charpentier, Jinek and others (Jinek, M. et al., 2012, Science 337:816-821) showed that Cas9, one of the Cas enzymes, in connection with an adapted version of the CRISPR (guide) sequences could be used for genetic editing. Since then the CRISPR-Cas system has been studied extensively and currently it is one of the most promising tools in genetic engineering because of its ease of use (e.g. Young, S. 2014, MIT Technol. Review: http://www.technologyreview.com/review/524451/genome-surgery/; Mali, P. et al., 2013, Nature Meth. 10:957-963).

[0005] Although the CRISPR-Cas system has been proven to work in eukaryotes for genetic editing, it has also been found that the system is not fail-proof. A very recent article (Cyranoski, D and Reardon, S., Nature News 22 Apr. 2015) demonstrated that, although Chinese scientists had been able to genetically engineer the genomes of human embryo's, in most of the embryo's that were treated the system did not work at all, or not successfully.

[0006] Accordingly, there is still insufficient information on? how the CRISPR-Cas system can be used in the eukaryotic cell and assays for studying the interaction of the gene editing sequences and the eukaryotic gene regulation are strongly needed.

### SUMMARY OF THE INVENTION

[0007] The present inventors now have surprisingly discovered that the occurrence of CRISPR sequences is not limited to bacteria and archaea, but that these sequences are also endogenous to eukaryotes. Especially in humans many CRISPR like sequences have been discovered. On basis of this finding, the invention now provides vector molecules comprising eukaryotic, preferably mammalian, more preferably human CRISPR sequences. Accordingly, the invention comprises a eukaryotic expression vector comprising a eukaryotic CRISPR, preferably a mammalian or a plant CRISPR. Preferably, said CRISPR is one of the human CRISPR sequences of SEQ ID NO: 1-SEQ ID NO: 10141 or any of the non-human CRISPR sequences of SEQ ID NO: 10142-11297. Further a eukaryotic expression vector according to the present invention preferably comprises a human CRISPR.

[0008] In a further embodiment the CRISPR is under control of an endogenous promoter. In an alternative embodiment the CRISPR is under control of a heterologous promoter.

[0009] Further part of the invention is a method of assaying the effect of a eukaryotic CRISPR on the gene regulation of a eukaryotic cell comprising the steps of:
[0010] a. transforming or transfecting said cell with a eukaryotic expression vector according to the invention;
[0011] b. allowing the CRISPR to be transcribed;
[0012] c. measuring the transcriptome of said cell.

[0013] Preferably in said method the CRISPR is a human CRISPR and said cell is a human cell. Further preferred is a method in which the effect on gene regulation is measured by comparing the total mRNA of the cell before and after expression of the CRISPR.

[0014] In a further embodiment the invention comprises a method of assaying the transcription of a eukaryotic CRISPR comprising the steps of:
[0015] a. transforming or transfecting a cell with a eukaryotic expression vector according to claim 4;
[0016] b. subjecting said cell to a stimulus;
[0017] c. measuring the transcriptome of said cell.

[0018] Preferably in this method according said stimulus is a chemical stimulus or a physical stimulus.

[0019] Also part of the invention is the use of a eukaryotic CRISPR for studying gene regulation in eukaryotes, preferably mammals, more preferably humans.

[0020] Preferably, said CRISPR is a human CRISPR sequence selected from SEQ ID NO: 1-SEQ ID NO: 11297, more preferably a humana sequence from any of SEQ ID NO: 1-10141.

[0021] The present invention further also comprises a kit comprising a vector according to the invention and instructions for use in a method according to the invention.

### LEGEND TO THE FIGURES

[0022] FIG. 1 Total number of human CRISPR blast hits visualized per taxonomic division. For both the human CRISPR repeats and spacers the number of BLAST hits were counted for each taxonomic division. False represents confirmed human CRISPRs and true represents questionable human CRISPRs. Taxonomic divisions include, Bacteria, Environmental samples, Invertebrates, Mammals, Phages, Plants, Primates, Rodents, Synthetic, Vertebrates and Viruses.

[0023] FIG. 2 ChIP seq data reveals specific transcription activity in human CRISPRs. CRISPRs are visualized in red blocks. The human reference genome that is used and uploaded into IGV is Hg19. IGV software is used to visualize the ChIP-seq data obtained from ENCODE for the cell lines U2OS, Caco-2 and K562. A) ChIP seq data for human CRISPR with SEQ ID:4443 shows in an intergenic region at position (chr7:99,190,443-99,190,629) transcription activity in U205,

[0024] Caco-2, and K562 cell lines; B) ChIP seq data for human CRISPR with SEQ ID: 5838 shows in an intronic region at postion (chr10:70,276,886-70,277,044) transcription activity in U2OS and Caco-2 cell lines, with transcripts reverse complementary orientated to the RNA transcript of gene SLC25A16; C) ChIP seq data for human CRISPR with SEQ ID: 189 shows in an exonic region at postion (chr1:45,965,017-45,965,162) transcription activity in the cell lines U2OS, Caco-2 and K562, with transcripts that are reverse complementary orientated to the mRNA transcript of gene CCDC163P; D) ChIP seq data for human CRISPR with SEQ ID: 8204 shows in an intronic region at postion (chr17:19,149,168-19,149,358) transcription activity in the cell line U2OS, with transcripts that are reverse complementary orientated to the RNA transcript of gene EPN2; E) ChIP seq data for human CRISPR with SEQ ID: 4038 shows in an intronic region at postion (chr6:167,093,513-167,093,713) transcription activity in the cell lines U2OS and K562, with transcripts that are reverse complementary orientated to the RNA transcript of gene RPS6KA2; F) ChIP seq data for human CRISPR with SEQ ID: 5213 shows in an intronic region at postion (chr9:8,644,153-8,644,333) transcription activity in the cell lines Caco-2 and K562, with transcripts that are reverse complementary orientated to the RNA transcript of gene PTPRD.

[0025] FIG. 3 Human body map RNA-seq data reveals tissue specific human CRISPR transcription activity. CRISPRs are visualized in red blocks. The human reference genome that is used and uploaded into IGV is Hg19. IGV software is used to visualize the Body Map 2.0 (Illumina HiSeq) RNA-sequence data of tissues Brain, Colon, Heart, Kidney, Liver, Lung, Skeltal muscle, Thyroid, White blood cell, Adrenal, Lymph node, Ovary, Testes, Adipose, Breast and Prostate and is visualized in blue. A) RNA-seq data for human CRISPR with SEQ ID: 2296 shows in an intronic region at position (chr4:15,617,172-15,617,283) transcription activity in tissues Brain and Heart; B) RNA-seq data for human CRISPR with SEQ ID: 2367 shows in an intronic region at position (chr4:36,322,560-36,322,655) transcription activity in tissues Lung and Lymph node; C) RNA-seq data for human CRISPR with SEQ ID: 3247 shows in an intergenic region at position (chr5:98,280,615-98,280,721) transcription activity in tissues Colon, Heart, Thyroid and Ovary; D) RNA-seq data for human CRISPR with SEQ ID: 4311 shows in an intronic region at position (chr7:70,215,373-70,215,559) transcription activity in tissues Thyroid and Adrenal; E) RNA-seq data for human CRISPR with SEQ ID: 4397 shows in an intergenic region at position (chr7:99,188,869-99,189,616) transcription activity in tissues Brain, Kidney, Testes and Adipose; F) RNA-seq data for human CRISPR with SEQ ID: 9451 shows in an intergenic region at position (chrX:1,007,571-1,007,935) transcription activity in tissues Colon, Kidney, Thyroid and Testes.

[0026] FIG. 4 Twelve examples of human CRISPR expression vectors. Sequences from example 4 were uploaded into Snapgene viewer, which is a versatile tool to create annotated sequence files in a vector map format. This is done for the human CRISPR sequences that recede in ADAM10, ADAM17, ADAMTS9-AS2, TUBD and IL-10. The vectors contain an U6 promoter and a transcription termination signal, the human CRISPR sequence were generated in such a way that the expression vector would generated transcripts in a Forward and Reverse complementary manner.

[0027] FIG. 5 Human CRISPR vectors control gene expression. A) Human CRISPR vector pLOHA_7710_+ downregulates ADAM10 expression in U2OS cells 24-48 hours after transfection. For each plasmid pLOHA_7710_+ or pLOHA_7710_−, pCDNA3.1 transfected and untreated cells three representable pictures are shown. U2OS cells were stained for ADAM10 visualized in red and the nuclei were stained with DAPI. Pictures were taken at a 40× magnification using the Olympus XI51 microscope; B) and C) Human CRISPR vector pLOHA 1762− induces ADAMTS9 expression by silencing the ADAMTS9-AS2 antisense RNA. For each plasmid pLOHA_1762_+ or pLOHA_1762_−, pCDNA3.1 transfected and untreated cells three representable pictures are shown. U2OS bone marrow epithelial cells and SKBR2 breast cancer epithelial cells were stained for ADAMTS9 (visualized in red) and the nuclei were stained with DAPI. Pictures were taken at a 40× magnification using the Olympus XI51 microscope. D) Western blot of U2OS total cell lysates that were transfected with pLOHA_7710_+ or pLOHA_7710_−, pCDNA3.1 or left untreated. Expression differences of ADAM10 were detected between 55 and 70 kDa.

[0028] FIG. 6 Human CRISPRs and Cas9 induce toxic double stranded DNA breaks in U2OS cells. U2OS cell were infected with C. jejuni strain GB11, GB11Acas9, GB11Acas9A, untreated (NC), 1Gy radiated for the induction of DSB (PC) or pCDNA3.1+CjCas9 (GB11) transfected. BLESS identified break position is visualized as a blue box; A) shows a CjCas9 dependent DSB break position that is induced by GB11, GB11Δcas9Δ and CjCas9 at the exact same position visualized in region (chr5:57,182,990-57,183,030) for which the functional human CRISPR guide with patent seq ID 115 was required; B) shows a CjCas9 dependent DSB break position that is induced by GB11, GB1lAcas9A and CjCas9 at the exact same position visualized in region (chr1:237,600,585-237,600,625) for which the functional human CRISPR guide with SEQ ID 1471 was required. This human CRISPR guide is actively transcribed in U2OS cells at position chr2:219072954-219073050 under standard cell culture conditions; C) shows a CjCas9 dependent DSB break position that is induced by GB11, GB11Acas9A and CjCas9 at the exact same position visualized in region (chr17:4,861,104-4,861,144) for which the functional human CRISPR guide with SEQ ID 1109 was required. This human CRISPR guide is actively transcribed in U2OS cells at position chr2:85737752-85738008 under standard cell culture conditions; D) shows a CjCas9 dependent DSB break position that is induced by GB11, GB11Acas9A and CjCas9 at the exact same position visualized in region (chr12:14,461,527-14,461,567) for which the functional human CRISPR guide with SEQ ID 130 was required. This human CRISPR guide is actively transcribed in U2OS cells at position chr1:28173679-28173782 under standard cell culture conditions; E) shows a CjCas9 dependent DSB break position that is induced by GB11, GB11Acas9A and CjCas9 at the exact same position visualized in region (chr10:33,287,520-33,287,560) for which the functional human CRISPR guide with SEQ ID 2750 was required. This human CRISPR guide is actively transcribed in U2OS cells at position chr4:163803118-163803209 under standard cell culture conditions.

[0029] FIG. 7 Effect of medicines, chemicals or biological agents on CRISPR expression. Four affymetrix probes 1557645_at, 1560498_at, 1556520_at, 1559278_at that matched exactly with the human CRISPR SEQ ID 1884; 7953; 2700 or 4812, respectively, were analysed in http://www.ncbi.nlm.nih.gov/geoprofiles/. Expression dataset pictures were copied to a word file when significant expression differences were observed between controls and (a)biotic compounds or medicine exposed cell lines or subjects.

### DETAILED DESCRIPTION OF THE INVENTION

[0030] The structure of a prokaryotic CRISPR array (see e.g., Horvath, P. and Barrangou, R., 2010, Science 327:167-170) includes a number of short repeating sequences referred to as “repeats.” The repeats occur in clusters and up to 249 repeats have been identified in a single CRISPR array and are usually regularly spaced by unique intervening sequences referred to as “spacers.” Typically, CRISPR repeats vary from about 24 to 47 base pairs in length and are often? palindromic. The repeats are generally arranged in clusters (up to about 20 or more per genome) of repeated units. The spacers are located between two repeats and typically each spacer has a unique sequence of about 21-72 base pairs in length. Many spacers are identical to or have high similarity with known phage sequences. It has been shown that the insertion of a spacer sequence from a specific phage into a bacterial CRISPR can confer resistance to that phage (see e.g., Barrangou, R. et al., 2007, Science 315:1709-1712).

[0031] In addition to repeats and spacers, a CRISPR array may also include a leader sequence and often a set of two to six associated cas genes. Typically the leader sequence is an AT-rich sequence of up to 550 base pairs directly adjoining the 5′ end of the first repeat. New repeat-spacer units are almost always added to the CRISPR array between the leader and the first repeat.

[0032] The present inventor discovered CRISPR sequences in eukaryotes that follow a similar genetic make-up as the prokaryotic CRISPRs: short repeating, often palindromic sequences of 24-47 base pairs separated by spacers of—generally—21-72 base pairs. A number of such eukaryotic CRISPR sequences is depicted in Table IA-IX of the priority document PCT/NL2015/050438, now presented as SEQ ID NO: 1-10000, (Table IA covers chromosome 1, table IB covers chromosome 2, etc.) or in Table IIA-IIM of said priority document, now presented as SEQ ID NO: 10142-11297 in which non-human eukaryotic CRISPRs are depicted. New in this application are the CRISPR sequences of SEQ ID NO: 146-149, 545-554 and 10001-10141. These CRISPRs occasionally are found to be accompanied by a Cas gene, sometimes even more than one Cas gene.

[0033] In the present application a eukaryotic CRISPR sequence is defined as a sequence that comprises at least two partly or complete palindromic repeats of 24-47 base pairs and at least one spacer of about 21-72 base pairs, wherein the spacer is derived from a eukaryotic sequence, especially a spacer sequence that is derived from the same organism as from which the CRISPR sequence is derived. The spacer may originally be derived from a non-eukaryotic pathogen, but it will be different from the non-eukaryotic sequence because of the connection with the repeat sequences which are of eukaryotic origin. According to this definition a human CRISPR sequence would be a CRISPR sequence in which the spacer contains a human sequence or a sequence of a human pathogen (such as a retrovirus (HERV)), but of which the repeat sequences are of human origin. A specific group of eukaryotic CRISPRs are those CRISPRS that comprise spacer sequences that are only consisting of sequences that are derived from the same organisms as from which the repeat sequences are derived (see also FIG. 1). These are indicated in the present application as “pure eukaryotic” CRISPR sequences. Accordingly a “pure human CRISPR sequence” is a pure eukaryotic sequence that is derived from a human being. The spacer of such a pure eukaryotic CRISPR generally is directed against a eukaryotic target sequence in such a sense that it will be capable of binding to such a sequence. It should further be mentioned that the spacer sequence does not need to be completely identical to the (eukaryotic) target. As has been proven in the work on RNAi (see below) inhibition of expression can also be accomplished with sequences that are less than 100% complementary to their target sequence. Because of the occurrence of mutations within the spacer sequences, which are more vulnerable to mutations than sequences coding for functional proteins, it could be that the original 100% complementarity has become lost. Nevertheless, it appeared that the spacer sequences that the present inventors have found in the CRISPR sequences of eukaryotic organisms are highly homologous with endogenous sequences (i.e. sequences of the same organism) (see FIG. 1?).

[0034] The CRISPR sequences that are listed in the Tables IA-IX and Tables IIA-IIM of the priority document PCT/NL2015/050438, and which with some additions are now presented as SEQ ID NO: 1-11297, can been found by using the CRISPR Finder software (CRISPRFinder: a web tool to identify clustered regularly interspaced short palindromic repeats. Nucleic Acids Res. 2007 May 31). The program for this should be run with the following standard default parameters: a repeat length of 23 to 55 bp, a gap size between repeats of 25 to 60 bp, one nucleotide mismatch between repeats, but these parameters may be varied in an advanced search to obtain additional CRISPRs. Further criteria a CRISPR should fit to are the following:

[0035] The spacer size compared to the DR size: The CRISPRfinder filter is mainly added to eliminate structures having for example a 45 bp DR and a 20 bp spacer. By default, the spacer size should be from 0.6* to 2.5* the DR size.

[0036] The spacers' similarity: This filter is set to eliminate tandem repeats. The spacers' comparison is made by aligning them (using default parameters of the ClustalW program). Spacers' similarity percentage is calculated with the function percentage_identity( )of the (Bio)perl interface (AlignIO methods, ClustalW interface; Larkin, M. A. et al., 2007, Bioinformatics 23:2947-2948). By default, this parameter is set to 60%.

[0037] The DR conservation: The direct repeat should be well conserved. The DR scan is done using the fuzznuc program of the EMBOSS package (Rice, P. et al. 2000, Trends in Genetics 16:276-277). The allowed mismatch is equal to one-third of the DR size (default parameters) to take into account the degenerated DR (one of the flanking DRs). Then a global mismatch score is computed as the average of mismatches (not including the degenerated DR) and this score should not exceed a threshold of 20% of the DR size(by default).

[0038] It is submitted that for the human CRISPR sequences the sequences covered in SEQ ID NO: 1-10141 are the total of sequences that may be discovered by screening the genome that is contained in the database. In the present finding the genomes of Homo sapiens present in the Bioconductor packages was used comprising data of about 1000 human genomes that can be retrieved from http://bioconductor.org/packages/BSgenome.Hsapiens.1000genomes.hs37d5/. It is submitted that further human CRISPR sequences may be retrieved from human genomic sequences that are different from the sequences that have been assessed for the current collection of CRISPR sequences. Further, examples have been given for further sequences from eukaryotic organisms in SEQ ID NO: 9987-1142. This collection is of course by no means complete: for all species mentioned only a few CRISPR sequences have been listed and it is certain that other eukaryotic species and genera will also harbor numerous CRISPR sequences when assessed with the CRISPRfinder algorithm as described herein.

[0039] As can be seen from the sequence listing, many eukaryotic CRISPRs have only two repeats, but there are sequences which contain more than 30 repeat sequences and there is even one at human chromosome 19 with more than 150 repeat sequences. Some of the repeat sequences are recognized by the CRISPR Finder software as repeat sequences that are identical or very similar to repeat sequences that also occur in bacteria or archaea (see FIG. 1), but in most cases the repeat sequences, although fulfilling the criteria set for the detection of CRISPR repeat sequences, seem to be unique. As far as currently investigated there does not seem to be any specific feature of the eukaryotic CRISPR repeat sequences that would clearly distinguish them from prokaryotic or archaeal CRISPR repeat sequences, except of the course for the fact that most of the repeat sequences are unique for the eukaryotic source and no homologous sequences are thus far found in bacteria or archaea (see FIG. 1).

[0040] Considering the source of the eukaryotic CRISPRs it seems that in some cases they could be hypothesized to have entered the eukaryotic genome from horizontal gene transfer (by whatever mechanism) from mainly protists (obtained from data from Crisp, A. et al. 2015, Genome Biol. doi: 10.1186/s13059-015-0607-3) although to a lesser extent also from bacteria, plants and viruses. In other cases, however, eukaryotic CRISPRs appear to have spacer sequences that are derived from viruses or other pathogens that are known to infect eukaryotic cells. In this respect it thus appears that these CRISPRs have been established through a similar mechanism as is described for bacteria and archaea. However, in the majority of the cases, the spacers are derived from sequences that are endogenous to the organism in which the CRISPR sequence is found or has been obtained from through horizontal gene transfer.

[0041] It was further established by the present inventor that these eukaryotic CRISPR sequences were transcribed, since RNA transcripts derived from the CRISPR sequences have been shown to be present in eukaryotic cells (see FIG. 2A-F and Table 1). Accordingly, these CRISPRs are controlled by an endogenous promoter.

[0042] The role of these CRISPRs is yet unknown, but the present invention provides means for using the eukaryotic CRISPR sequences in assays to study their role and the interaction with gene regulation. Further, the assays described herein will enable studying the factors that are able to activate the eukaryotic CRISPRs and the interaction of the eukaryotic CRISPRs with the prokaryotic CRISPR-Cas systems that are used for genetic editing of eukaryotic cells.

[0043] In one of the assays of the invention a eukaryotic CRISPR sequence, e.g. selected from one of the Tables IA-IX and Tables IIA-IIM of the priority document PCT/NL2015/050438, with some additions now presented as SEQ ID NO: 1-11297, is either put under control of its own endogenous promoter sequences or under control of a eukaryotic promoter. It will of course depend on the nature and characteristics of the host cells which are transfected with such a vector which promoters would be suitable for driving expression of the CRISPR sequence(s). If the host cells are from the same organism as the CRISPR that is to be assayed, it would be possible to use the endogenous promoter. With respect to heterologous promoters, for plant cells plant specific promoters such as the CaMV 35S promoter or the Rubisco promoter may be taken, for insect cells a baculovirus promoter and for mammalian cells e.g. the SV40 promoter, CMV promoter or the EF-1 promoter may be used. Other promoters that may equally well be used are known to the skilled person. Alternatively, a (commercial) expression vector may be used, like the mammalian multi-purpose Flexi® Vectors, the pCMVTNT™ Vector, the pTargeT™ T-Vector, Regulated Mammalian Expression Systems, and the CheckMate™ Systems (all obtainable form Promega), adapted pCAGGS, pSC101 and other recombinase vectors (obtainable from Gene Bridges, Germany) or several plant expression vectors (see e.g. Tzfira, T. et al., 2007, Plant Physiol. 145:1087-1089). A heterologous promoter as indicated above is defined herein as a promoter that in nature does not drive expression of the CRISPR sequence with which it is connected in the vector, while an endogenous promoter is defined as the promoter that in nature does drive expression of the CRISPR that is present in the vector.

[0044] It is demonstrated that expression of most of the eukaryotic CRISPRs, especially those that have spacers which are directed to endogenous nucleotide sequences, may lead to changes in the gene regulation of the cell in which it is expressed. This is likely to be caused by the same mechanism that is also used with the CRISPR technology in prokaryotes: through RNAi. As has been mentioned above, the CRISPR sequences are expressed in the eukaryotic cell, but they are expressed in small, siRNA-like sequences. The fact that RNAi also may be applied in the eukaryotic cell has been established long ago (the scientific work was found fit for the Nobel prize), and RNAi has since then been one of the mechanisms to influence gene expression (predominantly used in genetic engineering of plant cells and for studying gene expression and gene knock-out). In the experimental part it has been established that indeed expression of the CRISPR sequences would lead to a change in the regulation of the expression of a genetic sequence by inhibiting the target to which the CRISPR sequence is directed. The effect on the expression depends on the nature of the element that is inhibited: if the element is (part of) the coding sequence or an enhancer element of such a coding sequence the expression of the product is generally inhibited. If the CRISPR is directed to an element that normally inhibits expression, the inhibition will be lifted as a result of the CRISPR sequence and expression will be enhanced.

[0045] Whether the enzyme DICER is involved in the processing of the CRISPR sequences into the RNAi-like mRNA sequences or whether an endogenous Cas gene or any other potential nuclease is responsible for this, is currently unknown. It has been shown in the experimental part that introduction of a (bacterial) Cas9 enzyme without further introduction of any guide RNA causes a plurality of doubles-stranded breaks in the DNA of an eukaryotic cell. It has further been shown that these double-stranded breaks occur at places that are considered to be targets for one (or more) of the eukaryotic CRISPR sequences of the present application. The conclusion thus is that a bacterial Cas9 enzyme is capable of mobilizing eukaryotic CRISPR sequences and use these as guide to the target sequence in order to perform the enzymatic function and to cause a double-stranded break in the target DNA. Further enhancement of this effect can be achieved by introducing, next to the Cas9 enzyme (or an enzyme that is functionally equivalent with Cas9, such as Cpf1) a vector harboring an eukaryotic CRISPR as presented in the present invention. This will cause an overexpression of the eukaryotic CRISPR sequence and thus it will increase the interaction between the enzyme and the CRISPR and thereby the effect of the CRISPR.

[0046] Thus, in general, whether or not in the presence of an endogenous or exogenous (heterologous) Cas enzyme, the production of the RNAi-like transcripts effects changes in the expression profile of the cell. Such changes may be measured in the assay according to the present invention by measuring the total transcriptome (i.e. the total amount and nature of the RNA produced) of the cell. By measuring the transcriptome of the cell for a specific CRISPR sequence and compare this to the transcriptome of a similar cell without expression of said specific CRISPR sequence, one is capable to determine the effects of the RNAi products that are produced by the expression of said eukaryotic CRISPR sequence on the expression of the gene or genes that are targeted, either directly or through any expression regulation sequence (such as enhancers or inhibitory sequences).

[0047] Methods to determine the transcriptome of a cell are sufficiently known to the skilled person. One such a method is known as RNA-seq (or Whole Transcriptome Shotgun Sequencing (WTSS)), which involves isolation of the RNA that is produced in the cell and sequencing this RNA with the use of deep sequencing technology (such as provided by Illumines,ChIP-seq or 454 Life Sciences).

[0048] Another type of assay is intended to study the mechanisms that cause expression of the CRISPR. It is shown in the experimental part that expression of the CRISPR sequences is dependent on factors, such as cell type, organ, etc. Although the precise function of this specific expression of the eukaryotic CRISPR sequences is still unknown, it may be that the expression is dependent on (or may be causing) development processes, such as cell growth and differentiation or any other endogenous or exogenous factor that may influence the (genetic) regulatory behavior of the cell.

[0049] For this assay a vector is used where the eukaryotic CRISPR sequence is under control of its endogenous promoter and the cell in which the vector has been introduced will be subjected to a stimulus, after which stimulus the transcriptome of the cell is studied for the occurrence of RNA sequences that are transcribed from the CRISPR under study. The stimulus can he a physical stimulus, such as temperature or pH, but alternatively a chemical stimulus may be administered. Such a chemical stimulus can be the administration of an endogenous compound, such as a hormone, a cytokine, a nucleotide sequence or an enzyme. It may also be a compound that does not naturally occur in the cell in which the vector has been introduced, such as an RNAi construct, a nuclease, or a Cas enzyme. When using exogenous stimuli, such as compounds that are typically used for CRISPR-Cas9 gene editing, the off-targeting that often occurs when engineering eukaryotic cells can easily be studied. A further variation on this assay can be made when such an off-targeting effect is found to use the assay to find compounds that may inhibit off-targeting. In this case a cell is provided with a vector having a eukaryotic CRISPR sequence according to the invention and a compound that is tested for its inhibition of off-targeting. Then, the cell is stimulated with the stimulus of which it is known that it causes transcription of the CRISPR and its corresponding effects on endogenous gene expression. In this way an inhibitor of off-targeting effect may be found. Of course then a final test may be to test the effect of a CRISPR-Cas gene-editing cassette in a eukaryotic target cell (which is known to have the eukaryotic CRISPR of which the off-targeting will be inhibited) in the presence of said inhibitor and to see whether now indeed the intended editing of the gene with the CRISPR-Cas system has taken place. Of course, next to Cas9 any enzyme that is capable of exerting double-stranded breaks and being targeted through an RNA guide, such as Cas9 variants and enzymes like Cpf1, may be used in this respect.

[0050] Further, it is shown that various CRISPR sequences may be expressed as a result of application of a variety of chemical compounds (with or without any pharmaceutical action) or in the occurrence of a certain condition. As such, the assay in which the CRISPR is expressed may be used as an assay to find compounds that would interfere with the compound(s) or condition(s) that would cause the expression of the CRISPR. In such a way the assay may be used to find compounds that may ameliorate or inhibit a condition by affecting the expression of a CRISPR sequence that is associated with said condition.

[0051] Concomitant with the results provided in the experimental section, preferred embodiments of the invention are vectors and assays as defined herein harboring or using the sequences that have been found to have special characteristics. The SEQ ID NOs of these sequences can be found in any of Tables 1-7 or in any of FIGS. 1-7.

### EXAMPLES

### Example 1

### List of Potential Human CRISPR Gene Targets

[0052] To identify potential targets of the identified human CRISPRs as submitted in the present application the package of https:/tbioconductor.org/packages/release/bioc/html/BiocGenerics.html was down-loaded for high-through put genomic analysis. By making use of this package the human CRISPRs could be blasted efficiently after which the CRISPR blast results were combined with the NCBI NT database with gene identifier (GI) and taxonomy (tax) information. Next to that this software tool also allowed us to analyse which sites in the human genome show homology to other organisms. The taxonomic annotation of these GI numbers was obtained from the NCBI via their eutils packages. BLAST output file was loaded and extended with the original region and GI information. A total of 5977649 BLAST results with 1175610 unique hits for 31970 unique queries was loaded. This default output of BLAST does not add vital information such as the query length therefore a FastA file was loaded to annotate the BLAST results. BLAST alignments were found for 97.5736% of the queries, but 795 hits were left annotated. As the BLAST results table was excessively large (5977649), a basic filtering on query coverage was performed. Alignments that cover less than 95% of the query were spurious and could thus be safely filtered out. This filtering resulted in more than 1643613 hits to be inspected in which only 4501 Queries harbored a single BLAST hit. For 1640646 BLAST results we could retrieve taxonomy Ids and further we found hits to 3917 taxonomic divisions. Most of the BLAST alignments pointed to eukaryote targets (FIG. 1) of which more than 35.000 were homo sapiens related. Interestingly, with respect to the known CRISPR defense function for the questionable human CRISPRs only 2.01% of the spacers aligned to bacterium or viral related nucleotides, whereas bacterial and viral targets occurred more often in confirmed CRISPRs 16.98%.

### Example 2

### Human CRISPRs are Expressed in Different Cell Lines

[0053] Since the submitted human CRISPRs as provided in the present application in potential target more than 35.000 genes it means that the mean target of each human CRISPR is three human endogenous genes. In prokaryotes the CRISPRs are shown to be involved in endogenous gene regulation which could also be true for the human CRISPRs. To test whether this is true we first need to know whether the human CRISPRs are actively transcribed. Therefore CHIP-seq data obtained from control samples of the human cell lines U2OS, Caco-2, and K562 were obtained from ENCODE. The exact condition of cell line culturing, ChIP-seq analyses, sequence mapping can be found under the accession numbers; 1) GSM935288 for the U2OS cell line; 2) GSM945236 for the Caco-2 cell line and 3) SAMN04284550 for the K562 cell line at http://www.ncbi.nlm.nih.gov/biosample/. The BAM files of the ChIP-seq data were uploaded into the Integrative Genomics Viewer. The ChIP-seq data of each cell line was mapped against the Hg19 genome. The human CRISPRs provided in the present application were position based identified on the Hg19 genome and transformed in galaxy (https://bioinf-galazian.erasmusmc.nl/galaxy/) into a block definition (BED) file and imported as a red region at the exact positions were they reside in the human genome. Uploading a BED file with every known small non-coding RNA helped us to establish that the transcription of human CRISPRs was specific. Cell line identified ChIP-seq regions were visualized in grey block (arrow-like to show the transcription orientation).

[0054] FIG. 2A-F shows examples of cell line specific ChIP-seq transcripts that match with the human CRISPRs and a large number are reverse complementary orientated on the transcripts of the human genes, strongly suggestive that they fulfill a regulatory role in endogenous gene regulation as was revealed earlier for other small regulatory RNAs. Table 1 shows an overview of the tissue and cell line specific CRISPR expression data of many of the sequences contained in the sequence listing.

Lengthy table referenced here
US20180187190A1-20180705-T00001
Please refer to the end of the specification for access instructions.

### Example 3

### Human CRISPRs are Organ Specifically Transcribed

[0055] Since the human CRISPRs were found to be actively transcribed in human cell lines it was further investigated whether the human CRISPRs are tissue specifically transcribed. Therefore RNA-sequence data from the body map 2.0 dataset of different tissues of Brain, Colon, Heart, Kidney, Lung, Liver, Thyroid, White Blood cell, Skeletal muscle, Adrenal, Lymph node, Ovary, Testes, Adipose, Breast, Prostate was uploaded into the Integrative Genomics Viewer from the broad institute (https://www.broadinstitute.org/igv/). Transcripts were mapped against the Hg19 reference genome. The human CRISPRs of the present application were position based identified on the Hg19 genome and transformed in galaxy (https://bioinf-galaxian.erasmusmc.nl/galaxy/) into a block definition (BED) file and imported as a red region at the exact positions were they reside in the human genome. Tissue specific transcripts were visualized in blue, specific details on how the RNA was isolated and transcript were mapped against the human genome can be retrieved from http://www.ncbi.nlm.nih.gov/geo/query/acc.egi?ace=GSE30611. It was found that the human CRISPRs matched with specific transcripts. This means that transcription of these specific CRISPR sequences is organ-specific. FIG. 3A-E shows examples of tissue specific transcripts that match with the human CRISPRs.

### Example 4

### Construction of a Vector with a Eukaryotic CRISPR

[0056] In order to unambiguously establish that human CRISPRs are responsible for gene regulation in an RNA interference manner, RNAi expression constructs were generated synthetically by Baseclear (Leiden, The Netherlands) using the sequences from a U6 promoter, one of the human CRISPR sequences as provided herein, a termination signal and a cloning vector PUC57. Twelve examples comprising the sequences of the U6 promoter, a human CRISPR sequences that resides in the genes ADAM10, ADAMTS9-AS2, ADAM17, TUBD and IL-10 are shown*. After synthesis the generated constructs were sequenced to confirm their correctness. A final concentration of four microgram of each plasmid was lyophilized in 40 microliter of 10mM Tris buffer (PH 8,5) to a final concentration of 100 nanogram per microliter per construct. Plasmids were transformed to Escherichia coli TOP10 cells and purified using the GeneJET plasmid Miniprep kit (Thermofisher Scientific, Breda, The Netherlands) with a final concentration of 1 microgram per microliter. Plasmid were stored at minus 20 degrees Celsius until further usage. Plasmid maps are visualized in FIG. 4 and named pLOHA+SEQ ID NO that corresponds to the human CRISPR sequence * as cloned into the RNAi expression vector PUC57 and as submitted in P108037PC00.

ADAM10_plus:
TGTACAAAAAAGCAGGCTTTAAAGGAACCAATTCAGTCGACTGGATCCGG
TACCAAGGTCGGGCAGGAAGAGGGCCTATTTCCCATGATTCCTTCATATT
TGCATATACGATACAAGGCTGTTAGAGAGATAATTAGAATTAATTTGACT
GTAAACACAAAGATATTAGTACAAAATACGTGACCTTAGAAAGTAATAAT
TTCTTGGGTAGTTTGCAGTTTTAAAATTATGTTTTAAAATGGACTATCAT
ATGCTTACCGTAACTTGAAAGTATTTCGATTTCTTGGCTTTATATATCTT
GTGGAAAGGACGAAACACCAATCTTTGGTAAGTCACTTAAACACTTAGTT
TCATCCTACAAAATGTTACAGAACAGGTATCAAATCTTTGGTAAGTCACT
TAAACACTTAGTTTCATCTTTTTT; (contains human CRISPR
SEQ ID NO: 7710)
ADAM10_Minus:
TGTACAAAAAAGCAGGCTTTAAAGGAACCAATTCAGTCGACTGGATCCGG
TACCAAGGTCGGGCAGGAAGAGGGCCTATTTCCCATGATTCCTTCATATT
TGCATATACGATACAAGGCTGTTAGAGAGATAATTAGAATTAATTTGACT
GTAAACACAAAGATATTAGTACAAAATACGTGACGTAGAAAGTAATAATT
TCTTGGGTAGTTTGCAGTTTTAAAATTATGTTTTAAAATGGACTATCATA
TGCTTACCGTAACTTGAAAGTATTTCGATTTCTTGGCTTTATATATCTTG
TGGAAAGGACGAAACACCGATGAAACTAAGTGTTTAAGTGACTTACCAAA
GATTTGATACCTGTTCTGTAACATTTTGTAGGATGAAACTAAGTGTTTAA
GTGACTTACCAAAGATTTTTTTT (contains human CRISPR SEQ
ID NO: 7710)
ADAMTS9-AS2_27_plus:
TGTACAAAAAAGCAGGCTTTAAAGGAACCAATTCAGTCGACTGGATCCGG
TACCAAGGTCGGGCAGGAAGAGGGCCTATTTCCCATGATTCCTTCATATT
TGCATATACGATACAAGGCTGTTAGAGAGATAATTAGAATTAATTTGACT
GTAAACACAAAGATATTAGTACAAAATACGTGACGTAGAAAGTAATAATT
TCTTGGGTAGTTTGCAGTTTTAAAATTATGTTTTAAAATGGACTATCATA
TGCTTACCGTAACTTGAAAGTATTTCGATTTCTTGGCTTTATATATCTTG
TGGAAAGGACGAAACACCACAGGAAGCATGGCTCAAGGAGATTTAGAGGC
TTAATTGGCTCATGGTTCTGCAGGAAGCACAGTTGTACAGGAAGCATGGC
TCAAGGAGATTTTTTTTT (contains human CRISPR SEQ ID
NO: 1762)
ADAMTS9-AS2_27_Minus:
TGTACAAAAAAGCAGGCTTTAAAGGAACCAATTCAGTCGACTGGATCCGG
TACCAAGGTCGGGCAGGAAGAGGGCCTATTTCCCATGATTCCTTCATATT
TGCATATACGATACAAGGCTGTTAGAGAGATAATTAGAATTAATTTGACT
GTAAACACAAAGATATTAGTACAAAATACGTGACGTAGAAAGTAATAATT
TCTTGGGTAGTTTGCAGTTTTAAAATTATGTTTTAAAATGGACTATCATA
TGCTTACCGTAACTTGAAAGTATTTCGATTTCTTGGCTTTATATATCTTG
TGGAAAGGACGAAACACCAAATCTCCTTGAGCCATGCTTCCTGTACAACT
GTGCTTCCTGCAGAACCATGAGCCAATTAAGCCTCTAAATCTCCTTGAGC
CATGCTTCCTGTTTTTTT (contains human CRISPR SEQ ID
NO: 1762)
ADAMTS9-AS2_71_plus:
TGTACAAAAAAGGAGGCTTTAAAGGAACCAATTCAGTCGACTGGATCCGG
TACCAAGGTCGGGCAGGAAGAGGGCCTATTTCCCATGATTCCTTCATATT
TGCATATACGATACAAGGCTGTTAGAGAGATAATTAGAATTAATTTGACT
GTAAACACAAAGATATTAGTACAAAATACGTGACGTAGAAAGTAATAATT
TCTTGGGTAGTTTGCAGTTTTAAAATTATGTTTTAAAATGGACTATCATA
TGCTTACCGTAACTTGAAAGTATTTCGATTTCTTGGCTTTATATATCTTG
TGGAAAGGACGAAACACCAATTAACTAAAGACATCGCTAGCTAATAGTGA
GGCTTCCCACCTATAATCTAAGCATAATATGTTAATTTAGCTAATGCAAT
TAACTAAAGACATCGCTAGCTAATATTTTTT (contains human
CRISPR SEQ ID NO: 1763)
ADAMTS9-AS2_71_Minus:
TGTACAAAAAAGCAGGCTTTAAAGGAACCAATTCAGTCGACTGGATCCGG
TACCAAGGTCGGGCAGGAAGAGGGCCTATTTCCCATGATTCCTTCATATT
TGCATATACGATACAAGGCTGTTAGAGAGATAATTAGAATTAATTTGACT
GTAAACACAAAGATATTAGTACAAAATACGTGACGTAGAAAGTAATAATT
TCTTGGGTAGTTTGCAGTTTTAAAATTATGTTTTAAAATGGACTATCATA
TGCTTACCGTAACTTGAAAGTATTTCGATTTCTTGGCTTTATATATCTTG
TGGAAAGGACGAAACACCTATTAGCTAGCGATGTCTTTAGTTAATTGCAT
TAGCTAAATTAACATATTATGCTTAGATTATAGGTGGGAAGCCTCACTAT
TAGCTAGCGATGTCTTTAGTTAATTTTTTTT (contains human
CRISPR SEQ ID NO: 1763)
ADAM17_plus:
TGTACAAAAAAGCAGGCTTTAAAGGAACCAATTCAGTCGACTGGATCCGG
TACCAAGGTCGGGCAGGAAGAGGGCCTATTTCCCATGATTCCTTCATATT
TGCATATACGATACAAGGCTGTTAGAGAGATAATTAGAATTAATTTGACT
GTAAACACAAAGATATTAGTACAAAATACGTGACGTAGAAAGTAATAATT
TCTTGGGTAGTTTGCAGTTTTAAAATTATGTTTTAAAATGGACTATCATA
TGCTTACCGTAACTTGAAAGTATTTCGATTTCTTGGCTTTATATATCTTG
TGGAAAGGACGAAACACCCAGCTAATTTTTGTATTTTTGGTAGCTGGGAT
TACAGGCATGAGCCACCACGTCCAGCTAATTTTTGTATTTTTAGTAGTTT
TTT (contains human CRISPR SEQ ID NO: 8306)
ADAM17_Minus:
TGTACAAAAAAGCAGGCTTTAAAGGAACCAATTCAGTCGACTGGATCCGG
TACCAAGGTCGGGCAGGAAGAGGGCCTATTTCCCATGATTCCTTCATATT
TGCATATACGATACAAGGCTGTTAGAGAGATAATTAGAATTAATTTGACT
GTAAACACAAAGATATTAGTACAAAATACGTGACGTAGAAAGTAATAATT
TCTTGGGTAGTTTGCAGTTTTAAAATTATGTTTTAAAATGGACTATCATA
TGCTTACCGTAACTTGAAAGTATTTCGATTTCTTGGCTTTATATATCTTG
TGGAAAGGACGAAACACCCTACTAAAAATACAAAAATTAGCTGGACGTGG
TGGCTCATGCCTGTAATCCCAGCTACCAAAAATACAAAAATTAGCTGTTT
TTT (contains human CRISPR SEQ ID NO: 8306)
TUBD_plus:
TGTACAAAAAAGCAGGCTTTAAAGGAACCAATTCAGTCGACTGGATCCGG
TACCAAGGTCGGGCAGGAAGAGGGCCTATTTCCCATGATTCCTTCATATT
TGCATATACGATACAAGGCTGTTAGAGAGATAATTAGAATTAATTTGACT
GTAAACACAAAGATATTAGTACAAAATACGTGACGTAGAAAGTAATAATT
TCTTGGGTAGTTTGCAGTTTTAAAATTATGTTTTAAAATGACTATCATAT
GCTTACCGTAACTTGAAAGTATTTCGATTTCTTGGCTTTATATATCTTGT
GGAAAGGACGAAACACCGTCTCTACTAAAAATACAAAAATTACCATCCTG
GCTAACACGGTGAAACCCCGTCTCTACTAAAAATACAAAAATTTTTT
(contains human CRISPR SEQ ID NO: 1138)
TUBD_Minus:
TGTACAAAAAAGCAGGCTTTAAAGGAACCAATTCAGTCGACTGGATCCGG
TACCAAGGTCGGGCAGGAAGAGGGCCTATTTCCCATGATTCCTTCATATT
TGCATATACGATACAAGGCTGTTAGAGAGATAATTAGAATTAATTTGACT
GTAAACACAAAGATATTAGTACAAAATACGTGACGTAGAAAGTAATAATT
TCTTGGGTAGTTTGCAGTTTTAAAATTATGTTTTAAAATGGACTATCATA
TGCTTACCGTAACTTGAAAGTATTTCGATTTCTTGGCTTTATATATCTTG
TGGAAAGGACGAAACACCTTTTTGTATTTTTAGTAGAGACGGGGTTTCAC
CGTGTTAGCCAGGATGGTAATTTTTGTATTTTTAGTAGAGACTTTTTT
(contains human CRISPR SEQ ID NO: 1138)
IL-10_plus:
TGTACAAAAAAGCAGGCTTTAAAGGAACCAATTCAGTCGACTGGATCCGG
TACCAAGGTCGGGCAGGAAGAGGGCCTATTTCCCATGATTCCTTCATATT
TGCATATACGATACAAGGCTGTTAGAGAGATAATTAGAATTAATTTGACT
GTAAACACAAAGATATTAGTACAAAATACGTGACGTAGAAAGTAATAATT
TCTTGGGTAGTTTGCAGTTTTAAAATTATGTTTTAAAATGGACTATCATA
TGCTTACCGTAACTTGAAAGTATTTCGATTTCTTGGCTTTATATATCTTG
TGGAAAGGACGAAACACCGAAACCCCGTCTCTACTAAAAAAATACAAAAA
AAATTAGCCGGGCATGGTCACACAATGAAACCCCGTCTCTACTAAAAATT
TTTT (contains human CRISPR SEQ ID NO: 8156)
IL-10_Minus:
TGTACAAAAAAGCAGGCTTTAAAGGAACCAATTCAGTCGACTGGATCCGG
TACCAAGGTCGGGCAGGAAGAGGGCCTATTTCCCATGATTCCTTCATATT
TGCATATACGATACAAGGCTGTTAGAGAGATAATTAGAATTAATTTGACT
GTAAACACAAAGATATTAGTACAAAATACGTGACGTAGAAAGTAATAATT
TCTTGGGTAGTTTGCAGTTTTAAAATTATGTTTTAAAATGGACTATCATA
TGCTTACCGTAACTTGAAAGTATTTCGATTTCTTGGCTTTATATATCTTG
TGGAAAGGACGAAACACCTTTTTAGTAGAGACGGGGTTTCATTGTGTGAC
CATGCCCGGCTAATTTTTTTTGTATTTTTTTAGTAGAGACGGGGTTTCTT
TTTT (contains human CRISPR SEQ ID NO: 8156)

### Example 5

### RNAi Assay

[0057] After synthetically generating the constructs required to validate whether the human CRISPRs are able to actively regulated endogenous gene expression an RNAi assay was developed. For this assay U2OS bone marrow epithelial cells and SKBR3 breast cancer cells were maintained in Dulbecco's modified Eagle's medium (DMEM) (Invitrogen, Breda, The Netherlands) supplemented with 10% fetal bovine serum (FBS) (Invitrogen, Breda, The Netherlands), 100 U/ml penicillin, 100 μg/ml streptomycin and 1% nonessential amino acids (NEAR) (Invitrogen, Breda, The Netherlands). U2OS and SKBR3 cells were used because they have low amounts of ADAMTS9 and in case of U2OS cells high amounts of ADAM10. The cells were cultured in a 75-cm² flask (Greiner Bio-one, Alphen aan den Rijn, The Netherlands) at 37° C. and 5% CO₂ in a humidified air incubator. For the RNAi assay U2OS and SKBR3 cells were grown to 40% to 50% confluence on chamber slides (Greiner Bio-one, Alphen aan den Rijn, The Netherlands). Cells (U2OS and SKBR3) were transiently transfected with plasmid DNA pLOHA_7710_−; pLOHA_7710_+; pLOHA_1762_− and pLOHA_1762_+ (see FIG. 4) to silence ADAM10 and ADAMTS9-AS2 expression using X-tremeGENE HP DNA Transfection Reagent (Roche Applied Science, Almere, The Netherlands), according to the manufacturer's protocols. After 24-48 hours the U2OS and SKBR3 cells were washed three times with room temperature HBSS and fixated with 4% paraformaldehyde and then permeabilized with 0.1% HBSS-Triton X-100 solution for 20 min. Background antibody binding was blocked with block buffer (1% fetal bovine serum, 1% Tween20, HBSS). Slides were then incubated for one hour with the respective primary antibody for ADAM10 or ADAMTS9 (Abeam, Cambridge, United Kingdom) at a 1:1000 dilution in block buffer. The appropriate secondary antibodies from the IgG class (H+L), A594 labeled (Molecular Probes, Bleiswijk, The Netherlands), providing a red stain were used to detect ADAM10 and ADAMTS9 thereby revealing that pLOHA_7710_+ was able to affect silencing of the expression of ADAM10 in U2OS cells (FIG. 5A). For pLOHA_1762_− it was revealed that ADAMTS9 expression was induced in both U2OS (FIG. 5B) and SKBR3 (FIG. 5C) cells, because the antisense RNA (ADAMTS9-AS2) that controls the expression of ADAMTS9 is silenced by pLOHA_1762_−. Untreated U2OS and SKBR3 cells were used as a negative control and pCDNA3.1 as an empty plasmid control (FIG. 5A-C). To confirm that pLOHA_7710_+ was able to affect the expression of ADAM10 in U2OS cells, an SDS-PAGE was performed after which the ADAM10 protein was quantified by western immunoblotting. Briefly, U2OS cells were transfected with pLOHA_7710_+, pLOHA_7710_−, pCDNA3.1 or left untreated and after 24-48 hours the four samples were homogenized in Laemmli buffer. The cell lysate was resolved on a 12% SDS-polyacrylamide gel and electroblotted to a nitrocellulose membrane (Protran; Schleicher & Schuell, Dassel, Germany). The membrane was then pre-incubated in blocking buffer (5% non-fat milk powder, 0.1% (w/v) Tween 20 in PBS) and incubated with a 1:1000 dilution of a polyclonal antibody that is specific for ADAM10 (ABCAM). Subsequently, the membrane was incubated with a 1:1000 diluted AP-conjugated appropriate secondary antibody (Promega, Leiden, The Netherlands). NBT-BCIP solution was used that reacts with the AP-conjugated appropriate secondary antibody to visualize ADAM10 expression (FIG. 5D).

[0058] From these experiments it follows that constructs with human CRISPR sequences can influence the expression of genes, both positively (enhancing expression) or negatively (inhibition of expression) depending on the function of the target sequence.

### Example 6

### Human CRISPRs Function as a Guide RNA for Cas9 to Induce Toxic Double Stranded DNA Breaks in Eukaryotic Cells

[0059] With respect to CRISPR-Cas9 genome editing the role of human CRISPRs in off targeting was also explored by making use of a specific technique called BLESS. For BLESS analysis the detailed protocol of Crosetto et al. (Nature Methods 10:361-365, 2013) was used. U2OS cells were infected for 6 hours with C. jejuni wild type, Acas9 and Acas9A and then fixated according to the Crossetto protocol and further processed for PCR and sequencing. Or, U2OS cells were transfected with pCDNA3.1+CjCas9 using HP X-tremegene transfection agent (Roche Applied Science, Almere, The Netherlands), radiated with 1 Gy or untreated and after 24 fixated according to the Crossetto protocol and further processed for PCR and sequencing. As a positive control U2OS cells with a stable integrated I-SceI site were transfected with a plasmid expressing the I-SceI enzyme harboring a nuclear localization site. After 24 hours cells were fixated according to the Crosetto protocol and further processed for PCR and sequencing (the U2OS-I-SceI cell line and plasmid containing the I-SceI-nls enzyme were kindly provided by Prof. Dik van Gent (Erasmus MC)). Analysis was performed according the Crosetto protocol with the addition that the obtained sequences were also mapped against the human CRISPR regions. In brief, we analyzed Illumina data using the Galaxy software from the bioinformatic department (Erasmus MC). We used a generated pipeline (https://bioinf-galaxian.erasmusmc.nl/galaxy/workflow) in which sequences of strand 1 and sequences of strand 2 were uploaded into the galaxian server separately and simultaneously. After upload the sequences were quality controlled using FastQC, concatenated and mapped with BWA-MEM against the hg19 genome and analyzed on the number of breaks induced, and positions of the breaks. Further, it was determined whether the breaks were PAM motif dependent or related to the human CRISPR transcripts identified in the U2OS cells. BAM files of the BLESS samples were uploaded into the Integrative Genomics Viewer. The human CRISPRs of the present application were position based identified on the Hg19 genome and transformed in galaxy (https://bioinf-galaxian.erasmusmc.nl/galaxy/) into a block definition (BED) file and imported as a red region at the exact positions where they reside in the human genome. FIG. 6A-E display examples of C. jejuni Cas9 breaks that could be complemented during the infection of U2OS cells and after transfection of CjCas9 in an eukaryotic expression vector of the same strain used for infection. Further inspection of the break sites revealed that the human CRISPRs functioned as a guide RNA. It was found that 23bp sequences of actively transcribed human CRISPRs in the U2OS cells base paired exactly in an ungapped manner with Cas9 dependent DSB break position in the genome of these eukaryotic cells during bacterial infection. This could be confirmed with plasmid transfection of Cas9 (Table 2).

[0060] Accordingly, this experiment shows that the human CRISPRs can function as a guide RNA whenever an appropriate Cas9 or Cas9-like enzyme is available.

TABLE 2
human CRISPR and CjCas9 induced toxic DSB's in U2OS cells.

| | | | No. | |
|---|---|---|---|---|
| Patent SEQ ID + hCRISPR | | Match | of | |
| position^{A} | CjCas9 induced breaksite in the genome U2OS cells^{B} | in %^{C} | bp^{D} | E-Value^{E} |
| 1109_Chr2_85737752_85738008 | Seq_GeCjCas9.OGB.20plus_chr9_66469976_66469999 | 100 | 22 | 2.00E−07 |
| 1109_Chr2_85737752_85738008 | Seq_GeCjCas9.OGB.20plus_chr9_66469976_66469999 | 100 | 22 | 2.00E−07 |
| 1138_Chr2_106855597_106856189 | Seq_GeCjCas9.OGB.20plus_chr3_134188505_134188528 | 100 | 23 | 1.00E−07 |
| 115_Chr1_24079090_24079202 | Seq_GeCjCas9.OGB.20plus_chr5_57183007_57183030 | 95.65 | 23 | 5.00E−06 |
| 115_Chr1_24079090_24079202 | Seq_GeCjCas9.OGB.20plus_chr1_237600602_237600625 | 95.65 | 23 | 5.00E−06 |
| 1333_Chr2_175844339_175844446 | Seq_GeCjCas9.OGB.20plus_chr5_31469271_31469294 | 95.65 | 23 | 5.00E−06 |
| 1419_Chr2_202729300_202729405 | Seq_GeCjCas9.OGB.20plus_chr9_66469976_66469999 | 95.65 | 23 | 4.00E−06 |
| 1471_Chr2_219072954_219073050 | Seq_GeCjCas9.OGB.20plus_chr1_237600602_237600625 | 100 | 23 | 2.00E−08 |
| 1471_Chr2_219072954_219073050 | Seq_GeCjCas9.OGB.20plus_chr1_237600602_237600625 | 100 | 22 | 7.00E−08 |
| 1473_Chr2_219713963_219714078 | Seq_GeCjCas9.OGB.20plus_chr15_57336567_57336590 | 95.65 | 23 | 5.00E−06 |
| 1513_Chr2_232501114_232501223 | Seq_GeCjCas9.OGB.20plus_chr9_66469976_66469999 | 100 | 23 | 2.00E−08 |
| 1513_Chr2_232501114_232501223 | Seq_GeCjCas9.OGB.20plus_chr2_54032605_54032628 | 95.65 | 23 | 5.00E−06 |
| 1513_Chr2_232501114_232501223 | Seq_GeCjCas9.OGB.20plus_chr1_150539667_150539690 | 95.65 | 23 | 5.00E−06 |
| 1565_Chr2_242262774_242262909 | Seq_GeCjCas9.OGB.20plus_chr5_31469271_31469294 | 95.65 | 23 | 6.00E−06 |
| 1565_Chr2_242262774_242262909 | Seq_GeCjCas9.OGB.20plus_chr12_47579379_47579402 | 95.65 | 23 | 6.00E−06 |
| 1611_Chr3_14667912_14668025 | Seq_GeCjCas9.OGB.20plus_chr5_57183007_57183030 | 95.65 | 23 | 5.00E−06 |
| 1611_Chr3_14667912_14668025 | Seq_GeCjCas9.OGB.20plus_chr1_237600602_237600625 | 95.65 | 23 | 5.00E−06 |
| 1611_Chr3_14667912_14668025 | Seq_GeCjCas9.OGB.20plus_chr9_66469976_66469999 | 100 | 22 | 8.00E−08 |
| 1631_Chr3_19957215_19957290 | Seq_GeCjCas9.OGB.20plus_chr5_31469271_31469294 | 95.65 | 23 | 3.00E−06 |
| 1631_Chr3_19957215_19957290 | Seq_GeCjCas9.OGB.20plus_chr12_47579379_47579402 | 95.65 | 23 | 3.00E−06 |
| 1672_Chr3_32692995_32693124 | Seq_GeCjCas9.OGB.20plus_chr9_66469976_66469999 | 100 | 23 | 2.00E−08 |
| 1672_Chr3_32692995_32693124 | Seq_GeCjCas9.OGB.20plus_chr2_54032605_54032628 | 95.65 | 23 | 6.00E−06 |
| 1672_Chr3_32692995_32693124 | Seq_GeCjCas9.OGB.20plus_chr1_150539667_150539690 | 95.65 | 23 | 6.00E−06 |
| 1672_Chr3_32692995_32693124 | Seq_GeCjCas9.OGB.20plus_chr9_66469976_66469999 | 100 | 22 | 9.00E−08 |
| 183_Chr1_43651312_43651417 | Seq_GeCjCas9.OGB.20plus_chr11_77993558_77993581 | 95.65 | 23 | 4.00E−06 |
| 1964_Chr3_136424743_136424831 | Seq_GeCjCas9.OGB.20plus_chr2_84646045_84646068 | 95.65 | 23 | 4.00E−06 |
| 1964_Chr3_136424743_136424831 | Seq_GeCjCas9.OGB.20plus_chr2_84646045_84646068 | 95.65 | 23 | 4.00E−06 |
| 2131_Chr3_185312627_185312778 | Seq_GeCjCas9.OGB.20plus_chr22_20325979_20326002 | 95.65 | 23 | 7.00E−06 |
| 2227_Chr4_1708589_1708850 | Seq_GeCjCas9.OGB.20plus_chr9_66469976_66469999 | 100 | 22 | 2.00E−07 |
| 2227_Chr4_1708589_1708850 | Seq_GeCjCas9.OGB.20plus_chr9_66469976_66469999 | 100 | 22 | 2.00E−07 |
| 2231_Chr4_3335028_3335150 | Seq_GeCjCas9.OGB.20plus_chr9_66469976_66469999 | 95.65 | 23 | 5.00E−06 |
| 2602_Chr4_111209282_111209397 | Seq_GeCjCas9.OGB.20plus_chr1_150539667_150539690 | 100 | 23 | 2.00E−08 |
| 2602_Chr4_111209282_111209397 | Seq_GeCjCas9.OGB.20plus_chr9_66469976_66469999 | 95.65 | 23 | 5.00E−06 |
| 2602_Chr4_111209282_111209397 | Seq_GeCjCas9.OGB.20plus_chr14_105785533_105785556 | 95.65 | 23 | 5.00E−06 |
| 2602_Chr4_111209282_111209397 | Seq_GeCjCas9.OGB.20plus_chr5_57183007_57183030 | 100 | 22 | 8.00E−08 |
| 2713_Chr4_148579989_148580100 | Seq_GeCjCas9.OGB.20plus_chr9_66469976_66469999 | 100 | 23 | 2.00E−08 |
| 2713_Chr4_148579989_148580100 | Seq_GeCjCas9.OGB.20plus_chr9_66469976_66469999 | 95.65 | 23 | 5.00E−06 |
| 2713_Chr4_148579989_148580100 | Seq_GeCjCas9.OGB.20plus_chr2_54032605_54032628 | 95.65 | 23 | 5.00E−06 |
| 2713_Chr4_148579989_148580100 | Seq_GeCjCas9.OGB.20plus_chr1_150539667_150539690 | 95.65 | 23 | 5.00E−06 |
| 2713_Chr4_148579989_148580100 | Seq_GeCjCas9.OGB.20plus_chr1_237600602_237600625 | 100 | 22 | 8.00E−08 |
| 2765_Chr4_165781005_165781116 | Seq_GeCjCas9.OGB.20plus_chr17_4861121_4861144 | 95.65 | 23 | 5.00E−06 |
| 2765_Chr4_165781005_165781116 | Seq_GeCjCas9.OGB.20plus_chr5_57183007_57183030 | 95.65 | 23 | 5.00E−06 |
| 2765_Chr4_165781005_165781116 | Seq_GeCjCas9.OGB.20plus_chr1_237600602_237600625 | 95.65 | 23 | 5.00E−06 |
| 2765_Chr4_165781005_165781116 | Seq_GeCjCas9.OGB.20plus_chr9_66469976_66469999 | 100 | 22 | 8.00E−08 |
| 3081_Chr5_37367004_37367113 | Seq_GeCjCas9.OGB.20plus_chr9_66469976_66469999 | 100 | 23 | 2.00E−08 |
| 3081_Chr5_37367004_37367113 | Seq_GeCjCas9.OGB.20plus_chr2_54032605_54032628 | 95.65 | 23 | 5.00E−06 |
| 3081_Chr5_37367004_37367113 | Seq_GeCjCas9.OGB.20plus_chr1_150539667_150539690 | 95.65 | 23 | 5.00E−06 |
| 3095_Chr5_40817519_40817633 | Seq_GeCjCas9.OGB.20plus_chr9_66469976_66469999 | 100 | 23 | 2.00E−08 |
| 3095_Chr5_40817519_40817633 | Seq_GeCjCas9.OGB.20plus_chr9_66469976_66469999 | 95.65 | 23 | 5.00E−06 |
| 3095_Chr5_40817519_40817633 | Seq_GeCjCas9.OGB.20plus_chr2_54032605_54032628 | 95.65 | 23 | 5.00E−06 |
| 3095_Chr5_40817519_40817633 | Seq_GeCjCas9.OGB.20plus_chr1_150539667_150539690 | 95.65 | 23 | 5.00E−06 |
| 3595_Chr6_28955550_28955804 | Seq_GeCjCas9.OGB.20plus_chr17_4861121_4861144 | 100 | 23 | 4.00E−08 |
| 3595_Chr6_28955550_28955804 | Seq_GeCjCas9.OGB.20plus_chr9_66469976_66469999 | 100 | 22 | 2.00E−07 |
| 3660_Chr6_47470473_47470577 | Seq_GeCjCas9.OGB.20plus_chr9_66469976_66469999 | 95.65 | 23 | 4.00E−06 |
| 3696_Chr6_58244470_58244582 | Seq_GeCjCas9.OGB.20plus_chr5_57183007_57183030 | 95.65 | 23 | 5.00E−06 |
| 3696_Chr6_58244470_58244582 | Seq_GeCjCas9.OGB.20plus_chr5_57183007_57183030 | 95.65 | 23 | 5.00E−06 |
| 3696_Chr6_58244470_58244582 | Seq_GeCjCas9.OGB.20plus_chr1_237600602_237600625 | 95.65 | 23 | 5.00E−06 |
| 3696_Chr6_58244470_58244582 | Seq_GeCjCas9.OGB.20plus_chr1_237600602_237600625 | 95.65 | 23 | 5.00E−06 |
| 3696_Chr6_58244470_58244582 | Seq_GeCjCas9.OGB.20plus_chr9_66469976_66469999 | 100 | 22 | 8.00E−08 |
| 3696_Chr6_58244470_58244582 | Seq_GeCjCas9.OGB.20plus_chr9_66469976_66469999 | 100 | 22 | 8.00E−08 |
| 3716_Chr6_64381823_64381962 | Seq_GeCjCas9.OGB.20plus_chr5_31469271_31469294 | 95.65 | 23 | 6.00E−06 |
| 3716_Chr6_64381823_64381962 | Seq_GeCjCas9.OGB.20plus_chr12_47579379_47579402 | 95.65 | 23 | 6.00E−06 |
| 4012_Chr6_158992376_158992468 | Seq_GeCjCas9.OGB.20plus_chr9_66469976_66469999 | 100 | 23 | 2.00E−08 |
| 4012_Chr6_158992376_158992468 | Seq_GeCjCas9.OGB.20plus_chr9_66469976_66469999 | 95.65 | 23 | 4.00E−06 |
| 4012_Chr6_158992376_158992468 | Seq_GeCjCas9.OGB.20plus_chr2_54032605_54032628 | 95.65 | 23 | 4.00E−06 |
| 4012_Chr6_158992376_158992468 | Seq_GeCjCas9.OGB.20plus_chr1_150539667_150539690 | 95.65 | 23 | 4.00E−06 |
| 4120_Chr7_5207255_5207379 | Seq_GeCjCas9.OGB.20plus_chr5_31469271_31469294 | 95.65 | 23 | 5.00E−06 |
| 4120_Chr7_5207255_5207379 | Seq_GeCjCas9.OGB.20plus_chr12_47579379_47579402 | 95.65 | 23 | 5.00E−06 |
| 4122_Chr7_5841079_5841203 | Seq_GeCjCas9.OGB.20plus_chr5_31469271_31469294 | 95.65 | 23 | 5.00E−06 |
| 4122_Chr7_5841079_5841203 | Seq_GeCjCas9.OGB.20plus_chr12_47579379_47579402 | 95.65 | 23 | 5.00E−06 |
| 4247_Chr7_49354671_49354751 | Seq_GeCjCas9.OGB.20plus_chr5_31469271_31469294 | 95.65 | 23 | 3.00E−06 |
| 4247_Chr7_49354671_49354751 | Seq_GeCjCas9.OGB.20plus_chr12_47579379_47579402 | 95.65 | 23 | 3.00E−06 |
| 4256_Chr7_62033801_62033942 | Seq_GeCjCas9.OGB.20plus_chr2_92316200_92316223 | 100 | 23 | 3.00E−08 |
| 4256_Chr7_62033801_62033942 | Seq_GeCjCas9.OGB.20plus_chr2_92316200_92316223 | 95.65 | 23 | 6.00E−06 |
| 4256_Chr7_62033801_62033942 | Seq_GeCjCas9.OGB.20plus_chr10_42404383_42404406 | 95.65 | 23 | 6.00E−06 |
| 4256_Chr7_62033801_62033942 | Seq_GeCjCas9.OGB.20plus_chr10_42398148_42398171 | 95.65 | 23 | 6.00E−06 |
| 4258_Chr7_62986233_62986335 | Seq_GeCjCas9.OGB.20plus_chr5_57183007_57183030 | 95.65 | 23 | 4.00E−06 |
| 4258_Chr7_62986233_62986335 | Seq_GeCjCas9.OGB.20plus_chr1_237600602_237600625 | 95.65 | 23 | 4.00E−06 |
| 4258_Chr7_62986233_62986335 | Seq_GeCjCas9.OGB.20plus_chr9_66469976_66469999 | 100 | 22 | 7.00E−08 |
| 4259_Chr7_63025117_63025233 | Seq_GeCjCas9.OGB.20plus_chr2_54032605_54032628 | 95.65 | 23 | 5.00E−06 |
| 4267_Chr7_65452039_65452140 | Seq_GeCjCas9.OGB.20plus_chr9_66469976_66469999 | 95.65 | 23 | 4.00E−06 |
| 4323_Chr7_75182490_75182581 | Seq_GeCjCas9.OGB.20plus_chr5_57183007_57183030 | 95.65 | 23 | 4.00E−06 |
| 4323_Chr7_75182490_75182581 | Seq_GeCjCas9.OGB.20plus_chr1_237600602_237600625 | 95.65 | 23 | 4.00E−06 |
| 4323_Chr7_75182490_75182581 | Seq_GeCjCas9.OGB.20plus_chr9_66469976_66469999 | 100 | 22 | 6.00E−08 |
| 4331_Chr7_76985344_76985448 | Seq_GeCjCas9.OGB.20plus_chr5_57183007_57183030 | 95.65 | 23 | 4.00E−06 |
| 4331_Chr7_76985344_76985448 | Seq_GeCjCas9.OGB.20plus_chr1_237600602_237600625 | 95.65 | 23 | 4.00E−06 |
| 4331_Chr7_76985344_76985448 | Seq_GeCjCas9.OGB.20plus_chr9_66469976_66469999 | 100 | 22 | 7.00E−08 |
| 4428_Chr7_98817493_98817576 | Seq_GeCjCas9.OGB.20plus_chr5_31469271_31469294 | 95.65 | 23 | 3.00E−06 |
| 483_Chr1_161313749_161313849 | Seq_GeCjCas9.OGB.20plus_chr4_25224555_25224578 | 95.65 | 23 | 4.00E−06 |
| 4932_Chr8_66296708_66296805 | Seq_GeCjCas9.OGB.20plus_chr8_58176271_58176294 | 95.65 | 23 | 4.00E−06 |
| 4932_Chr8_66296708_66296805 | Seq_GeCjCas9.OGB.20plus_chr10_69315106_69315129 | 95.65 | 23 | 4.00E−06 |
| 5328_Chr9_39478934_39479041 | Seq_GeCjCas9.OGB.20plus_chr5_57183007_57183030 | 95.65 | 23 | 5.00E−06 |
| 5328_Chr9_39478934_39479041 | Seq_GeCjCas9.OGB.20plus_chr1_237600602_237600625 | 95.65 | 23 | 5.00E−06 |
| 5328_Chr9_39478934_39479041 | Seq_GeCjCas9.OGB.20plus_chr9_66469976_66469999 | 100 | 22 | 7.00E−08 |
| 5328_Chr9_40806509_40806616 | Seq_GeCjCas9.OGB.20plus_chr5_57183007_57183030 | 95.65 | 23 | 5.00E−06 |
| 5328_Chr9_40806509_40806616 | Seq_GeCjCas9.OGB.20plus_chr1_237600602_237600625 | 95.65 | 23 | 5.00E−06 |
| 5328_Chr9_40806509_40806616 | Seq_GeCjCas9.OGB.20plus_chr9_66469976_66469999 | 100 | 22 | 7.00E−08 |
| 5328_Chr9_41623952_41624059 | Seq_GeCjCas9.OGB.20plus_chr5_57183007_57183030 | 95.65 | 23 | 5.00E−06 |
| 5328_Chr9_41623952_41624059 | Seq_GeCjCas9.OGB.20plus_chr1_237600602_237600625 | 95.65 | 23 | 5.00E−06 |
| 5328_Chr9_41623952_41624059 | Seq_GeCjCas9.OGB.20plus_chr9_66469976_66469999 | 100 | 22 | 7.00E−08 |
| 5416_Chr9_97060762_97060846 | Seq_GeCjCas9.OGB.20plus_chr15_57336567_57336590 | 95.65 | 23 | 3.00E−06 |
| 5421_Chr9_98070799_98070929 | Seq_GeCjCas9.OGB.20plus_chr9_66469976_66469999 | 100 | 23 | 2.00E−08 |
| 5421_Chr9_98070799_98070929 | Seq_GeCjCas9.OGB.20plus_chr2_54032605_54032628 | 95.65 | 23 | 6.00E−06 |
| 5421_Chr9_98070799_98070929 | Seq_GeCjCas9.OGB.20plus_chr1_150539667_150539690 | 95.65 | 23 | 6.00E−06 |
| 5469_Chr9_115520799_115520894 | Seq_GeCjCas9.OGB.20plus_chr3_134188505_134188528 | 95.65 | 23 | 4.00E−06 |
| 5562_Chr9_139952108_139952652 | Seq_GeCjCas9.OGB.20plus_chr2_54032605_54032628 | 100 | 22 | 4.00E−07 |
| 5636_Chr10_5923903_5924012 | Seq_GeCjCas9.OGB.20plus_chr9_66469976_66469999 | 100 | 23 | 2.00E−08 |
| 5636_Chr10_5923903_5924012 | Seq_GeCjCas9.OGB.20plus_chr2_54032605_54032628 | 95.65 | 23 | 5.00E−06 |
| 5636_Chr10_5923903_5924012 | Seq_GeCjCas9.OGB.20plus_chr1_150539667_150539690 | 95.65 | 23 | 5.00E−06 |
| 5690_Chr10_25063890_25063983 | Seq_GeCjCas9.OGB.20plus_chr2_54032605_54032628 | 95.65 | 23 | 4.00E−06 |
| 5733_Chr10_35354207_35354310 | Seq_GeCjCas9.OGB.20plus_chr9_66469976_66469999 | 95.65 | 23 | 4.00E−06 |
| 5840_Chr10_70449270_70449388 | Seq_GeCjCas9.OGB.20plus_chr15_57336567_57336590 | 95.65 | 23 | 5.00E−06 |
| 5927_Chr10_99470981_99471218 | Seq_GeCjCas9.OGB.20plus_chr15_57336567_57336590 | 95.65 | 23 | 1.00E−05 |
| 5931_Chr10_100924520_100924608 | Seq_GeCjCas9.OGB.20plus_chr9_66469976_66469999 | 100 | 22 | 6.00E−08 |
| 6071_Chr11_426264_426358 | Seq_GeCjCas9.OGB.20plus_chr4_25224555_25224578 | 95.65 | 23 | 4.00E−06 |
| 6215_Chr11_45570011_45570123 | Seq_GeCjCas9.OGB.20plus_chr9_66469976_66469999 | 100 | 22 | 8.00E−08 |
| 6224_Chr11_48839300_48839406 | Seq_GeCjCas9.OGB.20plus_chr2_92305595_92305618 | 100 | 22 | 7.00E−08 |
| 6224_Chr11_48839300_48839406 | Seq_GeCjCas9.OGB.20plus_chr7_61969183_61969206 | 95.65 | 23 | 4.00E−06 |
| 6224_Chr11_48839300_48839406 | Seq_GeCjCas9.OGB.20plus_chr10_42406652_42406675 | 95.65 | 23 | 4.00E−06 |
| 6224_Chr11_48839300_48839406 | Seq_GeCjCas9.OGB.20plus_chr10_42534960_42534983 | 95.65 | 23 | 4.00E−06 |
| 6251_Chr11_62746325_62746440 | Seq_GeCjCas9.OGB.20plus_chr9_66469976_66469999 | 95.65 | 23 | 5.00E−06 |
| 6366_Chr11_97961502_97961616 | Seq_GeCjCas9.OGB.20plus_chr5_57183007_57183030 | 95.65 | 23 | 5.00E−06 |
| 6366_Chr11_97961502_97961616 | Seq_GeCjCas9.OGB.20plus_chr1_237600602_237600625 | 95.65 | 23 | 5.00E−06 |
| 6366_Chr11_97961502_97961616 | Seq_GeCjCas9.OGB.20plus_chr9_66469976_66469999 | 100 | 22 | 8.00E−08 |
| 6381_Chr11_102133291_102133396 | Seq_GeCjCas9.OGB.20plus_chr15_57336567_57336590 | 95.65 | 23 | 4.00E−06 |
| 6430_Chr11_116672942_116673037 | Seq_GeCjCas9.OGB.20plus_chr5_57183007_57183030 | 95.65 | 23 | 4.00E−06 |
| 6430_Chr11_116672942_116673037 | Seq_GeCjCas9.OGB.20plus_chr5_57183007_57183030 | 95.65 | 23 | 4.00E−06 |
| 6430_Chr11_116672942_116673037 | Seq_GeCjCas9.OGB.20plus_chr1_237600602_237600625 | 95.65 | 23 | 4.00E−06 |
| 6430_Chr11_116672942_116673037 | Seq_GeCjCas9.OGB.20plus_chr1_237600602_237600625 | 95.65 | 23 | 4.00E−06 |
| 6430_Chr11_116672942_116673037 | Seq_GeCjCas9.OGB.20plus_chr9_66469976_66469999 | 100 | 22 | 6.00E−08 |
| 6430_Chr11_116672942_116673037 | Seq_GeCjCas9.OGB.20plus_chr9_66469976_66469999 | 100 | 22 | 6.00E−08 |
| 6549_Chr12_19578356_19578461 | Seq_GeCjCas9.OGB.20plus_chr5_57183007_57183030 | 95.65 | 23 | 4.00E−06 |
| 6549_Chr12_19578356_19578461 | Seq_GeCjCas9.OGB.20plus_chr1_237600602_237600625 | 95.65 | 23 | 4.00E−06 |
| 6549_Chr12_19578356_19578461 | Seq_GeCjCas9.OGB.20plus_chr9_66469976_66469999 | 100 | 22 | 7.00E−08 |
| 6622_Chr12_34685662_34685768 | Seq_GeCjCas9.OGB.20plus_chr1_121485297_121485320 | 95.65 | 23 | 4.00E−06 |
| 67_Chr1_8320950_8321039 | Seq_GeCjCas9.OGB.20plus_chr9_66469976_66469999 | 100 | 23 | 2.00E−08 |
| 67_Chr1_8320950_8321039 | Seq_GeCjCas9.OGB.20plus_chr2_54032605_54032628 | 95.65 | 23 | 4.00E−06 |
| 67_Chr1_8320950_8321039 | Seq_GeCjCas9.OGB.20plus_chr1_160639667_160639690 | 95.65 | 23 | 4.00E−06 |
| 676_Chr1_220181116_220181196 | Seq_GeCjCas9.OGB.20plus_chr9_66469976_66469999 | 95.65 | 23 | 3.00E−06 |
| 6811_Chr12_101866663_101866762 | Seq_GeCjCas9.OGB.20plus_chr5_31469271_31469294 | 95.65 | 23 | 4.00E−06 |
| 6811_Chr12_101866663_101866762 | Seq_GeCjCas9.OGB.20plus_chr12_47579379_47579402 | 95.65 | 23 | 4.00E−06 |
| 6838_Chr12_111068960_111069049 | Seq_GeCjCas9.OGB.20plus_chr15_57336567_57336590 | 95.65 | 23 | 4.00E−06 |
| 6871_Chr12_122174321_122174450 | Seq_GeCjCas9.OGB.20plus_chr9_66469976_66469999 | 100 | 23 | 2.00E−08 |
| 6871_Chr12_122174321_122174450 | Seq_GeCjCas9.OGB.20plus_chr9_66469976_66469999 | 100 | 23 | 2.00E−08 |
| 6871_Chr12_122174321_122174450 | Seq_GeCjCas9.OGB.20plus_chr2_54032605_54032628 | 95.65 | 23 | 6.00E−06 |
| 6871_Chr12_122174321_122174450 | Seq_GeCjCas9.OGB.20plus_chr2_54032605_54032628 | 95.65 | 23 | 6.00E−06 |
| 6871_Chr12_122174321_122174450 | Seq_GeCjCas9.OGB.20plus_chr1_150539667_150539690 | 95.65 | 23 | 6.00E−06 |
| 6871_Chr12_122174321_122174450 | Seq_GeCjCas9.OGB.20plus_chr1_150539667_150539690 | 95.65 | 23 | 6.00E−06 |
| 6877_Chr12_123951337_123951461 | Seq_GeCjCas9.OGB.20plus_chr9_66469976_66469999 | 100 | 23 | 2.00E−08 |
| 6877_Chr12_123951337_123951461 | Seq_GeCjCas9.OGB.20plus_chr2_54032605_54032628 | 95.65 | 23 | 5.00E−06 |
| 6877_Chr12_123951337_123951461 | Seq_GeCjCas9.OGB.20plus_chr1_150539667_150539690 | 95.65 | 23 | 5.00E−06 |
| 6922_Chr12_132006844_132006971 | Seq_GeCjCas9.OGB.20plus_chr18_1789852_1789875 | 100 | 23 | 2.00E−08 |
| 711_Chr1_225671162_225671256 | Seq_GeCjCas9.OGB.20plus_chr11_77993558_77993581 | 95.65 | 23 | 4.00E−06 |
| 7342_Chr14_28266246_28266360 | Seq_GeCjCas9.OGB.20plus_chr9_66469976_66469999 | 100 | 22 | 8.00E−08 |
| 7368_Chr14_35165026_35165163 | Seq_GeCjCas9.OGB.20plus_chr17_4861121_4861144 | 100 | 23 | 2.00E−08 |
| 7432_Chr14_59108883_59109015 | Seq_GeCjCas9.OGB.20plus_chr2_54032605_54032628 | 100 | 23 | 2.00E−08 |
| 7432_Chr14_59108883_59109015 | Seq_GeCjCas9.OGB.20plus_chr9_66469976_66469999 | 95.65 | 23 | 6.00E−06 |
| 7542_Chr14_96886299_96886423 | Seq_GeCjCas9.OGB.20plus_chr15_57336567_57336590 | 95.65 | 23 | 5.00E−06 |
| 7542_Chr14_96886299_96886423 | Seq_GeCjCas9.OGB.20plus_chr15_57336567_57336590 | 95.65 | 23 | 5.00E−06 |
| 7565_Chr14_102517614_102517709 | Seq_GeCjCas9.OGB.20plus_chr17_4861121_4861144 | 100 | 22 | 6.00E−08 |
| 7565_Chr14_102517614_102517709 | Seq_GeCjCas9.OGB.20plus_chr5_57183007_57183030 | 95.65 | 23 | 4.00E−06 |
| 7565_Chr14_102517614_102517709 | Seq_GeCjCas9.OGB.20plus_chr1_237600602_237600625 | 95.65 | 23 | 4.00E−06 |
| 7565_Chr14_102517614_102517709 | Seq_GeCjCas9.OGB.20plus_chr9_66469976_66469999 | 100 | 22 | 6.00E−08 |
| 7645_Chr15_33901557_33901681 | Seq_GeCjCas9.OGB.20plus_chr5_57183007_57183030 | 95.65 | 23 | 5.00E−06 |
| 7645_Chr15_33901557_33901681 | Seq_GeCjCas9.OGB.20plus_chr1_237600602_237600625 | 95.65 | 23 | 5.00E−06 |
| 7645_Chr15_33901557_33901681 | Seq_GeCjCas9.OGB.20plus_chr9_66469976_66469999 | 100 | 22 | 9.00E−08 |
| 7802_Chr15_93350891_93351001 | Seq_GeCjCas9.OGB.20plus_chr5_57183007_57183030 | 95.65 | 23 | 5.00E−06 |
| 7802_Chr15_93350891_93351001 | Seq_GeCjCas9.OGB.20plus_chr1_237600602_237600625 | 95.65 | 23 | 5.00E−06 |
| 7802_Chr15_93350891_93351001 | Seq_GeCjCas9.OGB.20plus_chr9_66469976_66469999 | 100 | 22 | 8.00E−08 |
| 7903_Chr16_14391749_14391872 | Seq_GeCjCas9.OGB.20plus_chr5_57183007_57183030 | 95.65 | 23 | 5.00E−06 |
| 7903_Chr16_14391749_14391872 | Seq_GeCjCas9.OGB.20plus_chr1_237600602_237600625 | 95.65 | 23 | 5.00E−06 |
| 7903_Chr16_14391749_14391872 | Seq_GeCjCas9.OGB.20plus_chr9_66469976_66469999 | 100 | 22 | 9.00E−08 |
| 7936_Chr16_21584700_21584808 | Seq_GeCjCas9.OGB.20plus_chr9_66469976_66469999 | 100 | 23 | 2.00E−08 |
| 7936_Chr16_21584700_21584808 | Seq_GeCjCas9.OGB.20plus_chr9_66469976_66469999 | 95.65 | 23 | 5.00E−06 |
| 7936_Chr16_21584700_21584808 | Seq_GeCjCas9.OGB.20plus_chr2_54032605_54032628 | 95.65 | 23 | 5.00E−06 |
| 7936_Chr16_21584700_21584808 | Seq_GeCjCas9.OGB.20plus_chr1_150539667_150539690 | 95.65 | 23 | 5.00E−06 |
| 7948_Chr16_27851607_27851699 | Seq_GeCjCas9.OGB.20plus_chr9_66469976_66469999 | 95.65 | 23 | 4.00E−06 |
| 7948_Chr16_27851607_27851699 | Seq_GeCjCas9.OGB.20plus_chr1_150539667_150539690 | 95.65 | 23 | 4.00E−06 |
| 796_Chr1_245138484_245138592 | Seq_GeCjCas9.OGB.20plus_chr9_66469976_66469999 | 95.65 | 23 | 5.00E−06 |
| 7988_Chr16_57839780_57839868 | Seq_GeCjCas9.OGB.20plus_chr3_134188505_134188528 | 95.65 | 23 | 4.00E−06 |
| 8012_Chr16_67844992_67845092 | Seq_GeCjCas9.OGB.20plus_chr5_57183007_57183030 | 95.65 | 23 | 4.00E−06 |
| 8012_Chr16_67844992_67845092 | Seq_GeCjCas9.OGB.20plus_chr1_237600602_237600625 | 95.65 | 23 | 4.00E−06 |
| 8012_Chr16_67844992_67845092 | Seq_GeCjCas9.OGB.20plus_chr9_66469976_66469999 | 100 | 22 | 7.00E−08 |
| 8022_Chr16_72062630_72062754 | Seq_GeCjCas9.OGB.20plus_chr9_66469976_66469999 | 100 | 23 | 2.00E−08 |
| 8022_Chr16_72062630_72062754 | Seq_GeCjCas9.OGB.20plus_chr9_66469976_66469999 | 95.65 | 23 | 5.00E−06 |
| 8022_Chr16_72062630_72062754 | Seq_GeCjCas9.OGB.20plus_chr2_54032605_54032628 | 95.65 | 23 | 5.00E−06 |
| 8022_Chr16_72062630_72062754 | Seq_GeCjCas9.OGB.20plus_chr1_150539667_150539690 | 95.65 | 23 | 5.00E−06 |
| 8218_Chr17_29052153_29052275 | Seq_GeCjCas9.OGB.20plus_chr5_57183007_57183030 | 95.65 | 23 | 5.00E−06 |
| 8218_Chr17_29052153_29052275 | Seq_GeCjCas9.OGB.20plus_chr1_237600602_237600625 | 95.65 | 23 | 5.00E−06 |
| 8218_Chr17_29052153_29052275 | Seq_GeCjCas9.OGB.20plus_chr9_66469976_66469999 | 100 | 22 | 8.00E−08 |
| 8258_Chr17_44126814_44126916 | Seq_GeCjCas9.OGB.20plus_chr9_66469976_66469999 | 100 | 23 | 2.00E−08 |
| 8258_Chr17_44126814_44126916 | Seq_GeCjCas9.OGB.20plus_chr2_54032605_54032628 | 95.65 | 23 | 4.00E−06 |
| 8258_Chr17_44126814_44126916 | Seq_GeCjCas9.OGB.20plus_chr1_150539667_150539690 | 95.65 | 23 | 4.00E−06 |
| 8269_Chr17_46994135_46994227 | Seq_GeCjCas9.OGB.20plus_chr11_77993558_77993581 | 95.65 | 23 | 4.00E−06 |
| 8309_Chr17_57323810_57323931 | Seq_GeCjCas9.OGB.20plus_chr5_31469271_31469294 | 95.65 | 23 | 5.00E−06 |
| 8309_Chr17_57323810_57323931 | Seq_GeCjCas9.OGB.20plus_chr12_47579379_47579402 | 95.65 | 23 | 5.00E−06 |
| 8311_Chr17_58019456_58019571 | Seq_GeCjCas9.OGB.20plus_chr9_66469976_66469999 | 100 | 23 | 2.00E−08 |
| 8311_Chr17_58019456_58019571 | Seq_GeCjCas9.OGB.20plus_chr2_54032605_54032628 | 95.65 | 23 | 5.00E−06 |
| 8311_Chr17_58019456_58019571 | Seq_GeCjCas9.OGB.20plus_chr1_150539667_150539690 | 95.65 | 23 | 5.00E−06 |
| 8376_Chr17_76278190_76278306 | Seq_GeCjCas9.OGB.20plus_chr9_66469976_66469999 | 100 | 23 | 2.00E−08 |
| 8376_Chr17_76278190_76278306 | Seq_GeCjCas9.OGB.20plus_chr9_66469976_66469999 | 95.65 | 23 | 5.00E−06 |
| 8376_Chr17_76278190_76278306 | Seq_GeCjCas9.OGB.20plus_chr2_54032605_54032628 | 95.65 | 23 | 5.00E−06 |
| 8376_Chr17_76278190_76278306 | Seq_GeCjCas9.OGB.20plus_chr1_150539667_150539690 | 95.65 | 23 | 5.00E−06 |
| 8378_Chr17_76790747_76790854 | Seq_GeCjCas9.OGB.20plus_chr9_66469976_66469999 | 100 | 23 | 2.00E−08 |
| 8378_Chr17_76790747_76790854 | Seq_GeCjCas9.OGB.20plus_chr2_54032605_54032628 | 95.65 | 23 | 5.00E−06 |
| 8378_Chr17_76790747_76790854 | Seq_GeCjCas9.OGB.20plus_chr1_150539667_150539690 | 95.65 | 23 | 5.00E−06 |
| 8594_Chr18_67847548_67847684 | Seq_GeCjCas9.OGB.20plus_chr11_77993558_77993581 | 95.65 | 23 | 6.00E−06 |
| 8680_Chr19_1887080_1887158 | Seq_GeCjCas9.OGB.20plus_chr5_31469271_31469294 | 95.65 | 23 | 3.00E−06 |
| 8680_Chr19_1887080_1887158 | Seq_GeCjCas9.OGB.20plus_chr12_47579379_47579402 | 95.65 | 23 | 3.00E−06 |
| 8703_Chr19_6442810_6442927 | Seq_GeCjCas9.OGB.20plus_chr5_57183007_57183030 | 95.65 | 23 | 5.00E−06 |
| 8703_Chr19_6442810_6442927 | Seq_GeCjCas9.OGB.20plus_chr5_57183007_57183030 | 95.65 | 23 | 5.00E−06 |
| 8703_Chr19_6442810_6442927 | Seq_GeCjCas9.OGB.20plus_chr1_237600602_237600625 | 95.65 | 23 | 5.00E−06 |
| 8703_Chr19_6442810_6442927 | Seq_GeCjCas9.OGB.20plus_chr1_237600602_237600625 | 95.65 | 23 | 5.00E−06 |
| 8703_Chr19_6442810_6442927 | Seq_GeCjCas9.OGB.20plus_chr9_66469976_66469999 | 100 | 22 | 8.00E−08 |
| 8703_Chr19_6442810_6442927 | Seq_GeCjCas9.OGB.20plus_chr9_66469976_66469999 | 100 | 22 | 8.00E−08 |
| 8703_Chr19_6442810_6442927 | Seq_GeCjCas9.OGB.20plus_chr17_4861121_4861144 | 95.65 | 23 | 5.00E−06 |
| 8773_Chr19_24585850_24585981 | Seq_GeCjCas9.OGB.20plus_chr7_61968699_61968722 | 95.65 | 23 | 6.00E−06 |
| 8773_Chr19_24585850_24585981 | Seq_GeCjCas9.OGB.20plus_chr21_10772927_10772950 | 95.65 | 23 | 6.00E−06 |
| 8773_Chr19_24585850_24585981 | Seq_GeCjCas9.OGB.20plus_chr18_18519302_18519325 | 95.65 | 23 | 6.00E−06 |
| 8991_Chr20_31299717_31299831 | Seq_GeCjCas9.OGB.20plus_chr1_237600602_237600625 | 95.65 | 23 | 5.00E−06 |
| 9041_Chr20_47791131_47791244 | Seq_GeCjCas9.OGB.20plus_chr5_57183007_57183030 | 95.65 | 23 | 5.00E−06 |
| 9041_Chr20_47791131_47791244 | Seq_GeCjCas9.OGB.20plus_chr1_237600602_237600625 | 95.65 | 23 | 5.00E−06 |
| 9041_Chr20_47791131_47791244 | Seq_GeCjCas9.OGB.20plus_chr9_66469976_66469999 | 100 | 22 | 8.00E−08 |
| 9338_Chr22_25198710_25198837 | Seq_GeCjCas9.OGB.20plus_chr5_57183007_57183030 | 95.65 | 23 | 5.00E−06 |
| 9338_Chr22_25198710_25198837 | Seq_GeCjCas9.OGB.20plus_chr1_237600602_237600625 | 95.65 | 23 | 5.00E−06 |
| 9338_Chr22_25198710_25198837 | Seq_GeCjCas9.OGB.20plus_chr9_66469976_66469999 | 100 | 22 | 9.00E−08 |
| 9345_Chr22_29847209_29847300 | Seq_GeCjCas9.OGB.20plus_chr5_57183007_57183030 | 95.65 | 23 | 4.00E−06 |
| 9345_Chr22_29847209_29847300 | Seq_GeCjCas9.OGB.20plus_chr1_237600602_237600625 | 95.65 | 23 | 4.00E−06 |
| 9345_Chr22_29847209_29847300 | Seq_GeCjCas9.OGB.20plus_chr9_66469976_66469999 | 100 | 22 | 6.00E−08 |
| 9352_Chr22_31657195_31657308 | Seq_GeCjCas9.OGB.20plus_chr5_57183007_57183030 | 95.65 | 23 | 5.00E−06 |
| 9352_Chr22_31657195_31657308 | Seq_GeCjCas9.OGB.20plus_chr1_237600602_237600625 | 95.65 | 23 | 5.00E−06 |
| 9352_Chr22_31657195_31657308 | Seq_GeCjCas9.OGB.20plus_chr9_66469976_66469999 | 100 | 22 | 8.00E−08 |
| 9378_Chr22_39847505_39847612 | Seq_GeCjCas9.OGB.20plus_chr5_57183007_57183030 | 95.65 | 23 | 5.00E−06 |
| 9378_Chr22_39847505_39847612 | Seq_GeCjCas9.OGB.20plus_chr1_237600602_237600625 | 95.65 | 23 | 5.00E−06 |
| 9378_Chr22_39847505_39847612 | Seq_GeCjCas9.OGB.20plus_chr9_66469976_66469999 | 100 | 22 | 7.00E−08 |
| 9385_Chr22_41341585_41341694 | Seq_GeCjCas9.OGB.20plus_chr9_66469976_66469999 | 95.65 | 23 | 5.00E−06 |
| 9390_Chr22_41797025_41797156 | Seq_GeCjCas9.OGB.20plus_chr9_66469976_66469999 | 100 | 23 | 2.00E−08 |
| 9390_Chr22_41797025_41797156 | Seq_GeCjCas9.OGB.20plus_chr2_54032605_54032628 | 95.65 | 23 | 6.00E−06 |
| 9390_Chr22_41797025_41797156 | Seq_GeCjCas9.OGB.20plus_chr1_150539667_150539690 | 95.65 | 23 | 6.00E−06 |
| 9393_Chr22_42647977_42648072 | Seq_GeCjCas9.OGB.20plus_chr11_77993558_77993581 | 95.65 | 23 | 4.00E−06 |
| 9397_Chr22_43417966_43418096 | Seq_GeCjCas9.OGB.20plus_chr9_66469976_66469999 | 100 | 22 | 9.00E−08 |
| 9397_Chr22_43417966_43418096 | Seq_GeCjCas9.OGB.20plus_chr9_66469976_66469999 | 100 | 22 | 9.00E−08 |
| 9462_ChrX_1371686_1371788 | Seq_GeCjCas9.OGB.20plus_chr5_57183007_57183030 | 95.65 | 23 | 4.00E−06 |
| 9462_ChrX_1371686_1371788 | Seq_GeCjCas9.OGB.20plus_chr1_237600602_237600625 | 95.65 | 23 | 4.00E−06 |
| 9462_ChrX_1371686_1371788 | Seq_GeCjCas9.OGB.20plus_chr9_66469976_66469999 | 100 | 22 | 7.00E−08 |
| 9468_ChrX_2006143_2006265 | Seq_GeCjCas9.OGB.20plus_chr15_57336567_57336590 | 95.65 | 23 | 5.00E−06 |
| 9515_ChrX_20205143_20205251 | Seq_GeCjCas9.OGB.20plus_chr15_57336567_57336590 | 95.65 | 23 | 5.00E−06 |
| 9556_ChrX_38313149_38313274 | Seq_GeCjCas9.OGB.20plus_chr9_66469976_66469999 | 100 | 23 | 2.00E−08 |
| 9556_ChrX_38313149_38313274 | Seq_GeCjCas9.OGB.20plus_chr2_54032605_54032628 | 95.65 | 23 | 5.00E−06 |
| 9556_ChrX_38313149_38313274 | Seq_GeCjCas9.OGB.20plus_chr1_150539667_150539690 | 95.65 | 23 | 5.00E−06 |
| 9563_ChrX_40853707_40853812 | Seq_GeCjCas9.OGB.20plus_chr9_66469976_66469999 | 100 | 23 | 2.00E−08 |
| 9563_ChrX_40853707_40853812 | Seq_GeCjCas9.OGB.20plus_chr5_57183007_57183030 | 95.65 | 23 | 4.00E−06 |
| 9563_ChrX_40853707_40853812 | Seq_GeCjCas9.OGB.20plus_chr2_54032605_54032628 | 95.65 | 23 | 4.00E−06 |
| 9563_ChrX_40853707_40853812 | Seq_GeCjCas9.OGB.20plus_chr1_237600602_237600625 | 95.65 | 23 | 4.00E−06 |
| 9563_ChrX_40853707_40853812 | Seq_GeCjCas9.OGB.20plus_chr1_150539667_150539690 | 95.65 | 23 | 4.00E−06 |
| 9563_ChrX_40853707_40853812 | Seq_GeCjCas9.OGB.20plus_chr9_66469976_66469999 | 100 | 22 | 7.00E−08 |
| 957_Chr2_34380079_34380204 | Seq_GeCjCas9.OGB.20plus_chr3_134188505_134188528 | 100 | 23 | 2.00E−08 |
| 957_Chr2_34380079_34380204 | Seq_GeCjCas9.OGB.20plus_chr3_134188505_134188528 | 95.65 | 23 | 5.00E−06 |
| 9611_ChrX_58490619_58490729 | Seq_GeCjCas9.OGB.20plus_chr18_18516861_18516884 | 95.65 | 23 | 5.00E−06 |
| 980_Chr2_39185999_39186100 | Seq_GeCjCas9.OGB.20plus_chr3_134188505_134188528 | 95.65 | 23 | 4.00E−06 |
| 9881_ChrY_1321686_1321788 | Seq_GeCjCas9.OGB.20plus_chr5_57183007_57183030 | 95.65 | 23 | 4.00E−06 |
| 9881_ChrY_1321686_1321788 | Seq_GeCjCas9.OGB.20plus_chr1_237600602_237600625 | 95.65 | 23 | 4.00E−06 |
| 9881_ChrY_1321686_1321788 | Seq_GeCjCas9.OGB.20plus_chr9_66469976_66469999 | 100 | 22 | 7.00E−08 |
| 9887_ChrY_1956143_1956265 | Seq_GeCjCas9.OGB.20plus_chr15_57336567_57336590 | 95.65 | 23 | 5.00E−06 |
| Cj Cas9 inf transf minus strand | | | | |
| 5839_Chr10_70283722_70283823 | Seq_GeCjCas9.OGB.20minus_chr3_160851802_160851825 | 100 | 22 | 7.00E−08 |
| 7590_Chr15_20014699_20014838 | Seq_GeCjCas9.OGB.20minus_chr20_26303264_26303287 | 100 | 22 | 1.00E−07 |
| 7590_Chr15_20014699_20014838 | Seq_GeCjCas9.OGB.20minus_chr20_26303264_26303287 | 100 | 22 | 1.00E−07 |
| 1109_Chr2_85737752_85738008 | Seq_GeCjCas9.OGB.20minus_chr17_4861104_4861127 | 100 | 23 | 4.00E−08 |
| 1109_Chr2_85737752_85738008 | Seq_GeCjCas9.OGB.20minus_chr17_4861104_4861127 | 100 | 23 | 4.00E−08 |
| 130_Chr1_28173679_28173782 | Seq_GeCjCas9.OGB.20minus_chr12_14461527_14461550 | 100 | 23 | 2.00E−08 |
| 1419_Chr2_202729300_202729405 | Seq_GeCjCas9.OGB.20minus_chr4_25224538_25224561 | 95.65 | 23 | 4.00E−06 |
| 1565_Chr2_242262774_242262909 | Seq_GeCjCas9.OGB.20minus_chr5_31469254_31469277 | 95.65 | 23 | 6.00E−06 |
| 1565_Chr2_242262774_242262909 | Seq_GeCjCas9.OGB.20minus_chr5_31469254_31469277 | 95.65 | 23 | 6.00E−06 |
| 1565_Chr2_242262774_242262909 | Seq_GeCjCas9.OGB.20minus_chr12_633017_633040 | 95.65 | 23 | 6.00E−06 |
| 1565_Chr2_242262774_242262909 | Seq_GeCjCas9.OGB.20minus_chr12_633017_633040 | 95.65 | 23 | 6.00E−06 |
| 1611_Chr3_14667912_14668025 | Seq_GeCjCas9.OGB.20minus_chr17_4861104_4861127 | 100 | 23 | 2.00E−08 |
| 1672_Chr3_32692995_32693124 | Seq_GeCjCas9.OGB.20minus_chr14_38384381_38384404 | 95.65 | 23 | 6.00E−06 |
| 1717_Chr3_47430996_47431114 | Seq_GeCjCas9.OGB.20minus_chr14_105785516_105785539 | 95.65 | 23 | 5.00E−06 |
| 1889_Chr3_109079607_109079696 | Seq_GeCjCas9.OGB.20minus_chr5_31469254_31469277 | 95.65 | 23 | 4.00E−06 |
| 1889_Chr3_109079607_109079696 | Seq_GeCjCas9.OGB.20minus_chr12_633017_633040 | 95.65 | 23 | 4.00E−06 |
| 2131_Chr3_185312627_185312778 | Seq_GeCjCas9.OGB.20minus_chr5_31469254_31469277 | 95.65 | 23 | 7.00E−06 |
| 2131_Chr3_185312627_185312778 | Seq_GeCjCas9.OGB.20minus_chr12_633017_633040 | 95.65 | 23 | 7.00E−06 |
| 2231_Chr4_3335028_3335150 | Seq_GeCjCas9.OGB.20minus_chr4_25224538_25224561 | 95.65 | 23 | 5.00E−06 |
| 2333_Chr4_25484480_25484588 | Seq_GeCjCas9.OGB.20minus_chr12_6328449_6328472 | 95.65 | 23 | 5.00E−06 |
| 2750_Chr4_163803118_163803209 | Seq_GeCjCas9.OGB.20minus_chr10_33287520_33287543 | 100 | 23 | 2.00E−08 |
| 2765_Chr4_165781005_165781116 | Seq_GeCjCas9.OGB.20minus_chr1_150539650_150539673 | 95.65 | 23 | 5.00E−06 |
| 2863_Chr4_186334311_186334430 | Seq_GeCjCas9.OGB.20minus_chr11_77993541_77993564 | 95.65 | 23 | 5.00E−06 |
| 3081_Chr5_37367004_37367113 | Seq_GeCjCas9.OGB.20minus_chr4_25224538_25224561 | 95.65 | 23 | 5.00E−06 |
| 3677_Chr6_52204775_52204885 | Seq_GeCjCas9.OGB.20minus_chr17_4861104_4861127 | 95.65 | 23 | 5.00E−06 |
| 3696_Chr6_58244470_58244582 | Seq_GeCjCas9.OGB.20minus_chr17_4861104_4861127 | 100 | 23 | 2.00E−08 |
| 3696_Chr6_58244470_58244582 | Seq_GeCjCas9.OGB.20minus_chr17_4861104_4861127 | 100 | 23 | 2.00E−08 |
| 3716_Chr6_64381823_64381962 | Seq_GeCjCas9.OGB.20minus_chr22_20325962_20325985 | 100 | 23 | 2.00E−08 |
| 4012_Chr6_158992376_158992468 | Seq_GeCjCas9.OGB.20minus_chr4_25224538_25224561 | 95.65 | 23 | 4.00E−06 |
| 4170_Chr7_21558982_21559129 | Seq_GeCjCas9.OGB.20minus_chr5_31469254_31469277 | 95.65 | 23 | 6.00E−06 |
| 4170_Chr7_21558982_21559129 | Seq_GeCjCas9.OGB.20minus_chr5_31469254_31469277 | 95.65 | 23 | 6.00E−06 |
| 4170_Chr7_21558982_21559129 | Seq_GeCjCas9.OGB.20minus_chr12_633017_633040 | 95.65 | 23 | 6.00E−06 |
| 4170_Chr7_21558982_21559129 | Seq_GeCjCas9.OGB.20minus_chr12_633017_633040 | 95.65 | 23 | 6.00E−06 |
| 4256_Chr7_62033801_62033942 | Seq_GeCjCas9.OGB.20minus_chr9_67320800_67320823 | 95.65 | 23 | 6.00E−06 |
| 4256_Chr7_62033801_62033942 | Seq_GeCjCas9.OGB.20minus_chr2_92316183_92316206 | 95.65 | 23 | 6.00E−06 |
| 4256_Chr7_62033801_62033942 | Seq_GeCjCas9.OGB.20minus_chr2_92316183_92316206 | 95.65 | 23 | 6.00E−06 |
| 4258_Chr7_62986233_62986335 | Seq_GeCjCas9.OGB.20minus_chr17_4861104_4861127 | 100 | 23 | 2.00E−08 |
| 4259_Chr7_63025117_63025233 | Seq_GeCjCas9.OGB.20minus_chr4_25224538_25224561 | 95.65 | 23 | 5.00E−06 |
| 4268_Chr7_65634491_65634593 | Seq_GeCjCas9.OGB.20minus_chr17_4861104_4861127 | 95.65 | 23 | 4.00E−06 |
| 4323_Chr7_75182490_75182581 | Seq_GeCjCas9.OGB.20minus_chr17_4861104_4861127 | 100 | 23 | 2.00E−08 |
| 4331_Chr7_76985344_76985448 | Seq_GeCjCas9.OGB.20minus_chr17_4861104_4861127 | 100 | 23 | 2.00E−08 |
| 5043_Chr8_103816263_103816365 | Seq_GeCjCas9.OGB.20minus_chr14_105785516_105785539 | 95.65 | 23 | 4.00E−06 |
| 5421_Chr9_98070799_98070929 | Seq_GeCjCas9.OGB.20minus_chr4_25224538_25224561 | 95.65 | 23 | 6.00E−06 |
| 5526_Chr9_134170222_134170294 | Seq_GeCjCas9.OGB.20minus_chr17_4861104_4861127 | 95.65 | 23 | 3.00E−06 |
| 5636_Chr10_5923903_5924012 | Seq_GeCjCas9.OGB.20minus_chr4_25224538_25224561 | 95.65 | 23 | 5.00E−06 |
| 5732_Chr10_35154125_35154258 | Seq_GeCjCas9.OGB.20minus_chr5_31469254_31469277 | 100 | 23 | 2.00E−08 |
| 5732_Chr10_35154125_35154258 | Seq_GeCjCas9.OGB.20minus_chr12_633017_633040 | 100 | 23 | 2.00E−08 |
| 5908_Chr10_92437211_92437345 | Seq_GeCjCas9.OGB.20minus_chr5_31469254_31469277 | 100 | 23 | 2.00E−08 |
| 5908_Chr10_92437211_92437345 | Seq_GeCjCas9.OGB.20minus_chr12_633017_633040 | 100 | 23 | 2.00E−08 |
| 6366_Chr11_97961502_97961616 | Seq_GeCjCas9.OGB.20minus_chr17_4861104_4861127 | 100 | 23 | 2.00E−08 |
| 6622_Chr12_34685662_34685768 | Seq_GeCjCas9.OGB.20minus_chr1_121485296_121485319 | 95.65 | 23 | 4.00E−06 |
| 67_Chr1_8320950_8321039 | Seq_GeCjCas9.OGB.20minus_chr4_25224538_25224561 | 95.65 | 23 | 4.00E−06 |
| 6740_Chr12_77287454_77287545 | Seq_GeCjCas9.OGB.20minus_chr17_4861104_4861127 | 95.65 | 23 | 4.00E−06 |
| 6871_Chr12_122174321_122174450 | Seq_GeCjCas9.OGB.20minus_chr4_25224538_25224561 | 95.65 | 23 | 6.00E−06 |
| 6871_Chr12_122174321_122174450 | Seq_GeCjCas9.OGB.20minus_chr4_25224538_25224561 | 95.65 | 23 | 6.00E−06 |
| 6877_Chr12_123951337_123951461 | Seq_GeCjCas9.OGB.20minus_chr4_25224538_25224561 | 95.65 | 23 | 5.00E−06 |
| 6882_Chr12_125436221_125436328 | Seq_GeCjCas9.OGB.20minus_chr11_84152405_84152428 | 100 | 23 | 2.00E−08 |
| 6882_Chr12_125436221_125436328 | Seq_GeCjCas9.OGB.20minus_chr11_84152405_84152428 | 95.65 | 23 | 5.00E−06 |
| 6882_Chr12_125436221_125436328 | Seq_GeCjCas9.OGB.20minus_chr1_102866197_102866220 | 100 | 23 | 2.00E−08 |
| 6882_Chr12_125436221_125436328 | Seq_GeCjCas9.OGB.20minus_chr1_102866197_102866220 | 95.65 | 23 | 5.00E−06 |
| 7590_Chr15_20014699_20014838 | Seq_GeCjCas9.OGB.20minus_chr10_42400353_42400376 | 95.65 | 23 | 6.00E−06 |
| 7802_Chr15_93350891_93351001 | Seq_GeCjCas9.OGB.20minus_chr17_4861104_4861127 | 100 | 23 | 2.00E−08 |
| 8012_Chr16_67844992_67845092 | Seq_GeCjCas9.OGB.20minus_chr17_4861104_4861127 | 100 | 23 | 2.00E−08 |
| 8218_Chr17_29052153_29052275 | Seq_GeCjCas9.OGB.20minus_chr17_4861104_4861127 | 100 | 23 | 2.00E−08 |
| 8248_Chr17_40906107_40906267 | Seq_GeCjCas9.OGB.20minus_chr5_31469254_31469277 | 100 | 23 | 3.00E−08 |
| 8248_Chr17_40906107_40906267 | Seq_GeCjCas9.OGB.20minus_chr5_31469254_31469277 | 95.65 | 23 | 7.00E−06 |
| 8248_Chr17_40906107_40906267 | Seq_GeCjCas9.OGB.20minus_chr12_633017_633040 | 100 | 23 | 3.00E−08 |
| 8248_Chr17_40906107_40906267 | Seq_GeCjCas9.OGB.20minus_chr12_633017_633040 | 95.65 | 23 | 7.00E−06 |
| 8258_Chr17_44126814_44126916 | Seq_GeCjCas9.OGB.20minus_chr4_25224538_25224561 | 95.65 | 23 | 4.00E−06 |
| 8311_Chr17_58019456_58019571 | Seq_GeCjCas9.OGB.20minus_chr4_25224538_25224561 | 95.65 | 23 | 5.00E−06 |
| 8515_Chr18_36425716_36425796 | Seq_GeCjCas9.OGB.20minus_chr10_70837929_70837952 | 95.65 | 23 | 3.00E−06 |
| 8703_Chr19_6442810_6442927 | Seq_GeCjCas9.OGB.20minus_chr17_4861104_4861127 | 100 | 23 | 2.00E−08 |
| 8703_Chr19_6442810_6442927 | Seq_GeCjCas9.OGB.20minus_chr17_4861104_4861127 | 100 | 23 | 2.00E−08 |
| 8773_Chr19_24585850_24585981 | Seq_GeCjCas9.OGB.20minus_chr21_10772910_10772933 | 100 | 23 | 2.00E−08 |
| 8799_Chr19_36687618_36687728 | Seq_GeCjCas9.OGB.20minus_chr11_84152405_84152428 | 100 | 23 | 2.00E−08 |
| 8799_Chr19_36687618_36687728 | Seq_GeCjCas9.OGB.20minus_chr1_102866197_102866220 | 95.65 | 23 | 5.00E−06 |
| 921_Chr2_22196550_22196650 | Seq_GeCjCas9.OGB.20minus_chr5_31469254_31469277 | 100 | 23 | 2.00E−08 |
| 921_Chr2_22196550_22196650 | Seq_GeCjCas9.OGB.20minus_chr12_633017_633040 | 100 | 23 | 2.00E−08 |
| 9338_Chr22_25198710_25198837 | Seq_GeCjCas9.OGB.20minus_chr5_31469254_31469277 | 100 | 23 | 2.00E−08 |
| 9338_Chr22_25198710_25198837 | Seq_GeCjCas9.OGB.20minus_chr5_31469254_31469277 | 95.65 | 23 | 5.00E−06 |
| 9338_Chr22_25198710_25198837 | Seq_GeCjCas9.OGB.20minus_chr17_4861104_4861127 | 100 | 23 | 2.00E−08 |
| 9338_Chr22_25198710_25198837 | Seq_GeCjCas9.OGB.20minus_chr12_633017_633040 | 100 | 23 | 2.00E−08 |
| 9338_Chr22_25198710_25198837 | Seq_GeCjCas9.OGB.20minus_chr12_633017_633040 | 95.65 | 23 | 5.00E−06 |
| 9389_Chr22_41784175_41784446 | Seq_GeCjCas9.OGB.20minus_chr5_31469254_31469277 | 100 | 23 | 5.00E−08 |
| 9389_Chr22_41784175_41784446 | Seq_GeCjCas9.OGB.20minus_chr12_633017_633040 | 100 | 23 | 5.00E−08 |
| 9390_Chr22_41797025_41797156 | Seq_GeCjCas9.OGB.20minus_chr5_31469254_31469277 | 95.65 | 23 | 6.00E−06 |
| 9390_Chr22_41797025_41797156 | Seq_GeCjCas9.OGB.20minus_chr4_25224538_25224561 | 95.65 | 23 | 6.00E−06 |
| 9390_Chr22_41797025_41797156 | Seq_GeCjCas9.OGB.20minus_chr12_633017_633040 | 95.65 | 23 | 6.00E−06 |
| 9403_Chr22_45070254_45070367 | Seq_GeCjCas9.OGB.20minus_chr2_61396269_61396292 | 95.65 | 23 | 5.00E−06 |
| 9462_ChrX_1371686_1371788 | Seq_GeCjCas9.OGB.20minus_chr17_4861104_4861127 | 100 | 23 | 2.00E−08 |
| 9468_ChrX_2006143_2006265 | Seq_GeCjCas9.OGB.20minus_chr5_31469254_31469277 | 100 | 23 | 2.00E−08 |
| 9468_ChrX_2006143_2006265 | Seq_GeCjCas9.OGB.20minus_chr12_633017_633040 | 100 | 23 | 2.00E−08 |
| 9468_ChrX_2006143_2006265 | Seq_GeCjCas9.OGB.20minus_chr12_47579362_47579385 | 100 | 23 | 2.00E−08 |
| 9468_ChrX_2006143_2006265 | Seq_GeCjCas9.OGB.20minus_chr3_134188488_134188511 | 95.65 | 23 | 5.00E−06 |
| 9556_ChrX_38313149_38313274 | Seq_GeCjCas9.OGB.20minus_chr4_25224538_25224561 | 95.65 | 23 | 5.00E−06 |
| 9563_ChrX_40853707_40853812 | Seq_GeCjCas9.OGB.20minus_chr17_4861104_4861127 | 100 | 23 | 2.00E−08 |
| 9563_ChrX_40853707_40853812 | Seq_GeCjCas9.OGB.20minus_chr5_31469254_31469277 | 95.65 | 23 | 4.00E−06 |
| 9563_ChrX_40853707_40853812 | Seq_GeCjCas9.OGB.20minus_chr4_25224538_25224561 | 95.65 | 23 | 4.00E−06 |
| 9563_ChrX_40853707_40853812 | Seq_GeCjCas9.OGB.20minus_chr12_633017_633040 | 95.65 | 23 | 4.00E−06 |
| 9611_ChrX_58490619_58490729 | Seq_GeCjCas9.OGB.20minus_chr7_61969174_61969197 | 95.65 | 23 | 5.00E−06 |
| 9611_ChrX_58490619_58490729 | Seq_GeCjCas9.OGB.20minus_chr7_61969166_61969189 | 95.65 | 23 | 5.00E−06 |
| 9611_ChrX_58490619_58490729 | Seq_GeCjCas9.OGB.20minus_chr2_92305578_92305601 | 95.65 | 23 | 5.00E−06 |
| 9789_ChrX_126005872_126006039 | Seq_GeCjCas9.OGB.20minus_chr5_15414511_15414534 | 100 | 23 | 3.00E−08 |
| 9831_ChrX_141577038_141577166 | Seq_GeCjCas9.OGB.20minus_chr20_54630895_54630918 | 95.65 | 23 | 6.00E−06 |
| 9881_ChrY_1321686_1321788 | Seq_GeCjCas9.OGB.20minus_chr17_4861104_4861127 | 100 | 23 | 2.00E−08 |
| 9887_ChrY_1956143_1956265 | Seq_GeCjCas9.OGB.20minus_chr5_31469254_31469277 | 100 | 23 | 2.00E−08 |
| 9887_ChrY_1956143_1956265 | Seq_GeCjCas9.OGB.20minus_chr12_633017_633040 | 100 | 23 | 2.00E−08 |
| 9887_ChrY_1956143_1956265 | Seq_GeCjCas9.OGB.20minus_chr12_47579362_47579385 | 100 | 23 | 2.00E−08 |
| 9887_ChrY_1956143_1956265 | Seq_GeCjCas9.OGB.20minus_chr3_134188488_134188511 | 95.65 | 23 | 5.00E−06 |
| 130_Chr1_28173679_28173782 | Seq_GeCjCas9.OGB.20minus_chr6_57173198_57173221 | 100 | 22 | 7.00E−08 |
| 1672_Chr3_32692995_32693124 | Seq_GeCjCas9.OGB.20minus_chr8_141501469_141501492 | 100 | 22 | 9.00E−08 |
| 3081_Chr5_37367004_37367113 | Seq_GeCjCas9.OGB.20minus_chr17_4861104_4861127 | 100 | 22 | 7.00E−08 |
| 4012_Chr6_158992376_158992468 | Seq_GeCjCas9.OGB.20minus_chr17_4861104_4861127 | 100 | 22 | 6.00E−08 |
| 5421_Chr9_98070799_98070929 | Seq_GeCjCas9.OGB.20minus_chr17_4861104_4861127 | 100 | 22 | 9.00E−08 |
| 5636_Chr10_5923903_5924012 | Seq_GeCjCas9.OGB.20minus_chr17_4861104_4861127 | 100 | 22 | 7.00E−08 |
| 6008_Chr10_126470795_126470906 | Seq_GeCjCas9.OGB.20minus_chr14_38384381_38384404 | 100 | 22 | 8.00E−08 |
| 67_Chr1_8320950_8321039 | Seq_GeCjCas9.OGB.20minus_chr17_4861104_4861127 | 100 | 22 | 6.00E−08 |
| 6871_Chr12_122174321_122174450 | Seq_GeCjCas9.OGB.20minus_chr17_4861104_4861127 | 100 | 22 | 9.00E−08 |
| 6871_Chr12_122174321_122174450 | Seq_GeCjCas9.OGB.20minus_chr17_4861104_4861127 | 100 | 22 | 9.00E−08 |
| 6877_Chr12_123951337_123951461 | Seq_GeCjCas9.OGB.20minus_chr17_4861104_4861127 | 100 | 22 | 9.00E−08 |
| 7342_Chr14_28266246_28266360 | Seq_GeCjCas9.OGB.20minus_chr8_141501469_141501492 | 100 | 22 | 8.00E−08 |
| 8258_Chr17_44126814_44126916 | Seq_GeCjCas9.OGB.20minus_chr17_4861104_4861127 | 100 | 22 | 7.00E−08 |
| 8311_Chr17_58019456_58019571 | Seq_GeCjCas9.OGB.20minus_chr17_4861104_4861127 | 100 | 22 | 8.00E−08 |
| 9390_Chr22_41797025_41797156 | Seq_GeCjCas9.OGB.20minus_chr17_4861104_4861127 | 100 | 22 | 9.00E−08 |
| 9556_ChrX_38313149_38313274 | Seq_GeCjCas9.OGB.20minus_chr17_4861104_4861127 | 100 | 22 | 9.00E−08 |
| 9563_ChrX_40853707_40853812 | Seq_GeCjCas9.OGB.20minus_chr17_4861104_4861127 | 100 | 22 | 7.00E−08 |
| 5636_Chr10_5923903_5924012 | Seq_GeCjCas9.OGB.20minus_chr14_105785516_105785539 | 100 | 22 | 7.00E−08 |
| 6222_Chr11_48829963_48830063 | Seq_GeCjCas9.OGB.20minus_chr16_35222615_35222638 | 100 | 22 | 7.00E−08 |
| 9460_ChrX_974288_974554 | Seq_GeCjCas9.OGB.20minus_chr17_4861104_4861127 | 100 | 22 | 2.00E−07 |
| 9879_ChrY_924288_924554 | Seq_GeCjCas9.OGB.20minus_chr17_4861104_4861127 | 100 | 22 | 2.00E−07 |
| 1042_Chr2_61856095_61856191 | Seq_GeCjCas9.OGB.20minus_chr8_141501469_141501492 | 100 | 23 | 2.00E−08 |
| 1129_Chr2_99927960_99928168 | Seq_GeCjCas9.OGB.20minus_chr11_84152405_84152428 | 100 | 23 | 3.00E−08 |
| 1129_Chr2_99927960_99928168 | Seq_GeCjCas9.OGB.20minus_chr11_84152405_84152428 | 95.65 | 23 | 8.00E−06 |
| 1129_Chr2_99927960_99928168 | Seq_GeCjCas9.OGB.20minus_chr1_102866197_102866220 | 95.65 | 23 | 8.00E−06 |
| 115_Chr1_24079090_24079202 | Seq_GeCjCas9.OGB.20minus_chr17_4861104_4861127 | 100 | 23 | 2.00E−08 |
| 1471_Chr2_219072954_219073050 | Seq_GeCjCas9.OGB.20minus_chr17_4861104_4861127 | 95.65 | 23 | 4.00E−06 |
| 1513_Chr2_232501114_232501223 | Seq_GeCjCas9.OGB.20minus_chr4_25224538_25224561 | 95.65 | 23 | 5.00E−06 |
| 1611_Chr3_14667912_14668025 | Seq_GeCjCas9.OGB.20minus_chr10_33287520_33287543 | 95.65 | 23 | 5.00E−06 |
| 1672_Chr3_32692995_32693124 | Seq_GeCjCas9.OGB.20minus_chr4_25224538_25224561 | 95.65 | 23 | 6.00E−06 |
| 1711_Chr3_45159251_45159353 | Seq_GeCjCas9.OGB.20minus_chr11_77993541_77993564 | 95.65 | 23 | 4.00E−06 |
| 1717_Chr3_47430996_47431114 | Seq_GeCjCas9.OGB.20minus_chr17_4861104_4861127 | 95.65 | 23 | 5.00E−06 |
| 183_Chr1_43651312_43651417 | Seq_GeCjCas9.OGB.20minus_chr5_31469254_31469277 | 95.65 | 23 | 4.00E−06 |
| 183_Chr1_43651312_43651417 | Seq_GeCjCas9.OGB.20minus_chr2_19125299_19125322 | 95.65 | 23 | 4.00E−06 |
| 183_Chr1_43651312_43651417 | Seq_GeCjCas9.OGB.20minus_chr12_633017_633040 | 95.65 | 23 | 4.00E−06 |
| 2188_Chr3_195844365_195844469 | Seq_GeCjCas9.OGB.20minus_chr9_37955762_37955785 | 95.65 | 23 | 4.00E−06 |
| 2188_Chr3_195844365_195844469 | Seq_GeCjCas9.OGB.20minus_chr1_18949543_18949566 | 95.65 | 23 | 4.00E−06 |
| 2227_Chr4_1708589_1708850 | Seq_GeCjCas9.OGB.20minus_chr17_4861104_4861127 | 100 | 23 | 4.00E−08 |
| 2227_Chr4_1708589_1708850 | Seq_GeCjCas9.OGB.20minus_chr17_4861104_4861127 | 100 | 23 | 4.00E−08 |
| 2231_Chr4_3335028_3335150 | Seq_GeCjCas9.OGB.20minus_chr2_61396269_61396292 | 95.65 | 23 | 5.00E−06 |
| 2383_Chr4_41129764_41129911 | Seq_GeCjCas9.OGB.20minus_chr5_31469254_31469277 | 100 | 23 | 3.00E−08 |
| 2383_Chr4_41129764_41129911 | Seq_GeCjCas9.OGB.20minus_chr5_31469254_31469277 | 100 | 23 | 3.00E−08 |
| 2383_Chr4_41129764_41129911 | Seq_GeCjCas9.OGB.20minus_chr12_633017_633040 | 100 | 23 | 3.00E−08 |
| 2383_Chr4_41129764_41129911 | Seq_GeCjCas9.OGB.20minus_chr12_633017_633040 | 100 | 23 | 3.00E−08 |
| 2572_Chr4_103410365_103410448 | Seq_GeCjCas9.OGB.20minus_chr5_15414511_15414534 | 95.65 | 23 | 3.00E−06 |
| 2637_Chr4_123398735_123398832 | Seq_GeCjCas9.OGB.20minus_chr7_77577434_77577457 | 95.65 | 23 | 4.00E−06 |
| 2713_Chr4_148579989_148580100 | Seq_GeCjCas9.OGB.20minus_chr4_25224538_25224561 | 95.65 | 23 | 5.00E−06 |
| 2726_Chr4_155034720_155034834 | Seq_GeCjCas9.OGB.20minus_chr2_40911491_40911514 | 95.65 | 23 | 5.00E−06 |
| 2726_Chr4_155034720_155034834 | Seq_GeCjCas9.OGB.20minus_chr2_40911491_40911514 | 95.65 | 23 | 5.00E−06 |
| 2765_Chr4_165781005_165781116 | Seq_GeCjCas9.OGB.20minus_chr17_4861104_4861127 | 100 | 23 | 2.00E−08 |
| 2835_Chr4_179859782_179859909 | Seq_GeCjCas9.OGB.20minus_chr17_4861104_4861127 | 95.65 | 23 | 5.00E−06 |
| 3095_Chr5_40817519_40817633 | Seq_GeCjCas9.OGB.20minus_chr4_25224538_25224561 | 95.65 | 23 | 5.00E−06 |
| 3352_Chr5_134057992_134058089 | Seq_GeCjCas9.OGB.20minus_chr5_31469254_31469277 | 100 | 23 | 2.00E−08 |
| 3352_Chr5_134057992_134058089 | Seq_GeCjCas9.OGB.20minus_chr12_633017_633040 | 100 | 23 | 2.00E−08 |
| 3465_Chr5_175785738_175785838 | Seq_GeCjCas9.OGB.20minus_chr17_4861104_4861127 | 95.65 | 23 | 4.00E−06 |
| 3595_Chr6_28955550_28955804 | Seq_GeCjCas9.OGB.20minus_chr17_4861104_4861127 | 100 | 23 | 4.00E−08 |
| 3648_Chr6_42994566_42994649 | Seq_GeCjCas9.OGB.20minus_chr22_20325962_20325985 | 95.65 | 23 | 3.00E−06 |
| 4085_Chr7_1117087_1117189 | Seq_GeCjCas9.OGB.20minus_chr14_38384381_38384404 | 95.65 | 23 | 4.00E−06 |
| 4122_Chr7_5841079_5841203 | Seq_GeCjCas9.OGB.20minus_chr10_84373887_84373910 | 95.65 | 23 | 5.00E−06 |
| 5328_Chr9_39478934_39479041 | Seq_GeCjCas9.OGB.20minus_chr17_4861104_4861127 | 100 | 23 | 2.00E−08 |
| 5328_Chr9_39478934_39479041 | Seq_GeCjCas9.OGB.20minus_chr22_20325962_20325985 | 95.65 | 23 | 5.00E−06 |
| 5328_Chr9_40806509_40806616 | Seq_GeCjCas9.OGB.20minus_chr17_4861104_4861127 | 100 | 23 | 2.00E−08 |
| 5328_Chr9_40806509_40806616 | Seq_GeCjCas9.OGB.20minus_chr22_20325962_20325985 | 95.65 | 23 | 5.00E−06 |
| 5328_Chr9_41623952_41624059 | Seq_GeCjCas9.OGB.20minus_chr17_4861104_4861127 | 100 | 23 | 2.00E−08 |
| 5328_Chr9_41623952_41624059 | Seq_GeCjCas9.OGB.20minus_chr22_20325962_20325985 | 95.65 | 23 | 5.00E−06 |
| 5416_Chr9_97060762_97060846 | Seq_GeCjCas9.OGB.20minus_chr5_31469254_31469277 | 95.65 | 23 | 3.00E−06 |
| 5416_Chr9_97060762_97060846 | Seq_GeCjCas9.OGB.20minus_chr12_633017_633040 | 95.65 | 23 | 3.00E−06 |
| 5517_Chr9_131430500_131430610 | Seq_GeCjCas9.OGB.20minus_chr8_141501469_141501492 | 95.65 | 23 | 5.00E−06 |
| 5526_Chr9_134170222_134170294 | Seq_GeCjCas9.OGB.20minus_chr1_150539650_150539673 | 95.65 | 23 | 3.00E−06 |
| 5528_Chr9_134330219_134330339 | Seq_GeCjCas9.OGB.20minus_chr1_237600585_237600608 | 95.65 | 23 | 5.00E−06 |
| 5690_Chr10_25063890_25063983 | Seq_GeCjCas9.OGB.20minus_chr14_105785516_105785539 | 95.65 | 23 | 4.00E−06 |
| 5732_Chr10_35154125_35154258 | Seq_GeCjCas9.OGB.20minus_chr11_77993541_77993564 | 95.65 | 23 | 6.00E−06 |
| 5927_Chr10_99470981_99471218 | Seq_GeCjCas9.OGB.20minus_chr5_31469254_31469277 | 100 | 23 | 4.00E−08 |
| 5927_Chr10_99470981_99471218 | Seq_GeCjCas9.OGB.20minus_chr12_633017_633040 | 100 | 23 | 4.00E−08 |
| 6224_Chr11_48839300_48839406 | Seq_GeCjCas9.OGB.20minus_chr16_35222615_35222638 | 95.65 | 23 | 4.00E−06 |
| 6224_Chr11_48839300_48839406 | Seq_GeCjCas9.OGB.20minus_chr10_42400588_42400611 | 95.65 | 23 | 4.00E−06 |
| 6224_Chr11_48839300_48839406 | Seq_GeCjCas9.OGB.20minus_chr10_42400586_42400609 | 95.65 | 23 | 4.00E−06 |
| 6251_Chr11_62746325_62746440 | Seq_GeCjCas9.OGB.20minus_chr10_84373887_84373910 | 95.65 | 23 | 5.00E−06 |
| 6398_Chr11_106194298_106194386 | Seq_GeCjCas9.OGB.20minus_chr10_30203146_30203169 | 95.65 | 23 | 4.00E−06 |
| 6430_Chr11_116672942_116673037 | Seq_GeCjCas9.OGB.20minus_chr17_4861104_4861127 | 100 | 23 | 2.00E−08 |
| 6430_Chr11_116672942_116673037 | Seq_GeCjCas9.OGB.20minus_chr17_4861104_4861127 | 100 | 23 | 2.00E−08 |
| 6549_Chr12_19578356_19578461 | Seq_GeCjCas9.OGB.20minus_chr17_4861104_4861127 | 100 | 23 | 2.00E−08 |
| 6844_Chr12_112837286_112837395 | Seq_GeCjCas9.OGB.20minus_chr5_31469254_31469277 | 95.65 | 23 | 5.00E−06 |
| 6844_Chr12_112837286_112837395 | Seq_GeCjCas9.OGB.20minus_chr12_633017_633040 | 95.65 | 23 | 5.00E−06 |
| 7369_Chr14_37751700_37751831 | Seq_GeCjCas9.OGB.20minus_chr5_31469254_31469277 | 95.65 | 23 | 6.00E−06 |
| 7369_Chr14_37751700_37751831 | Seq_GeCjCas9.OGB.20minus_chr12_633017_633040 | 95.65 | 23 | 6.00E−06 |
| 7565_Chr14_102517614_102517709 | Seq_GeCjCas9.OGB.20minus_chr17_4861104_4861127 | 100 | 23 | 2.00E−08 |
| 7567_Chr14_102955734_102955856 | Seq_GeCjCas9.OGB.20minus_chr5_31469254_31469277 | 95.65 | 23 | 5.00E−06 |
| 7567_Chr14_102955734_102955856 | Seq_GeCjCas9.OGB.20minus_chr12_633017_633040 | 95.65 | 23 | 5.00E−06 |
| 7645_Chr15_33901557_33901681 | Seq_GeCjCas9.OGB.20minus_chr17_4861104_4861127 | 100 | 23 | 2.00E−08 |
| 7677_Chr15_44758402_44758502 | Seq_GeCjCas9.OGB.20minus_chr8_141501469_141501492 | 95.65 | 23 | 4.00E−06 |
| 7839_Chr16_423673_423876 | Seq_GeCjCas9.OGB.20minus_chr10_70837929_70837952 | 95.65 | 23 | 8.00E−06 |
| 7903_Chr16_14391749_14391872 | Seq_GeCjCas9.OGB.20minus_chr17_4861104_4861127 | 100 | 23 | 2.00E−08 |
| 7903_Chr16_14391749_14391872 | Seq_GeCjCas9.OGB.20minus_chr17_4861104_4861127 | 95.65 | 23 | 5.00E−06 |
| 7936_Chr16_21584700_21584808 | Seq_GeCjCas9.OGB.20minus_chr4_25224538_25224561 | 95.65 | 23 | 5.00E−06 |
| 8016_Chr16_69825675_69825753 | Seq_GeCjCas9.OGB.20minus_chr6_57173198_57173221 | 95.65 | 23 | 3.00E−06 |
| 8022_Chr16_72062630_72062754 | Seq_GeCjCas9.OGB.20minus_chr4_25224538_25224561 | 95.65 | 23 | 5.00E−06 |
| 8176_Chr17_9045196_9045306 | Seq_GeCjCas9.OGB.20minus_chr5_31469254_31469277 | 100 | 23 | 2.00E−08 |
| 8176_Chr17_9045196_9045306 | Seq_GeCjCas9.OGB.20minus_chr12_633017_633040 | 100 | 23 | 2.00E−08 |
| 8269_Chr17_46994135_46994227 | Seq_GeCjCas9.OGB.20minus_chr5_31469254_31469277 | 95.65 | 23 | 4.00E−06 |
| 8269_Chr17_46994135_46994227 | Seq_GeCjCas9.OGB.20minus_chr2_19125299_19125322 | 95.65 | 23 | 4.00E−06 |
| 8269_Chr17_46994135_46994227 | Seq_GeCjCas9.OGB.20minus_chr12_633017_633040 | 95.65 | 23 | 4.00E−06 |
| 8311_Chr17_58019456_58019571 | Seq_GeCjCas9.OGB.20minus_chr14_105785516_105785539 | 95.65 | 23 | 5.00E−06 |
| 8376_Chr17_76278190_76278306 | Seq_GeCjCas9.OGB.20minus_chr4_25224538_25224561 | 95.65 | 23 | 5.00E−06 |
| 8378_Chr17_76790747_76790854 | Seq_GeCjCas9.OGB.20minus_chr4_25224538_25224561 | 95.65 | 23 | 5.00E−06 |
| 8384_Chr17_77719715_77719791 | Seq_GeCjCas9.OGB.20minus_chr5_31469254_31469277 | 95.65 | 23 | 3.00E−06 |
| 8384_Chr17_77719715_77719791 | Seq_GeCjCas9.OGB.20minus_chr12_633017_633040 | 95.65 | 23 | 3.00E−06 |
| 8594_Chr18_67847548_67847684 | Seq_GeCjCas9.OGB.20minus_chr5_31469254_31469277 | 95.65 | 23 | 6.00E−06 |
| 8594_Chr18_67847548_67847684 | Seq_GeCjCas9.OGB.20minus_chr2_19125299_19125322 | 95.65 | 23 | 6.00E−06 |
| 8594_Chr18_67847548_67847684 | Seq_GeCjCas9.OGB.20minus_chr12_633017_633040 | 95.65 | 23 | 6.00E−06 |
| 8686_Chr19_2837128_2837261 | Seq_GeCjCas9.OGB.20minus_chr5_31469254_31469277 | 100 | 23 | 2.00E−08 |
| 8686_Chr19_2837128_2837261 | Seq_GeCjCas9.OGB.20minus_chr12_633017_633040 | 100 | 23 | 2.00E−08 |
| 8773_Chr19_24585850_24585981 | Seq_GeCjCas9.OGB.20minus_chr7_61968701_61968724 | 95.65 | 23 | 6.00E−06 |
| 8773_Chr19_24585850_24585981 | Seq_GeCjCas9.OGB.20minus_chr1_121485280_121485303 | 95.65 | 23 | 6.00E−06 |
| 8773_Chr19_24585850_24585981 | Seq_GeCjCas9.OGB.20minus_chr1_121484767_121484790 | 95.65 | 23 | 6.00E−06 |
| 8991_Chr20_31299717_31299831 | Seq_GeCjCas9.OGB.20minus_chr17_4861104_4861127 | 95.65 | 23 | 5.00E−06 |
| 9041_Chr20_47791131_47791244 | Seq_GeCjCas9.OGB.20minus_chr17_4861104_4861127 | 100 | 23 | 2.00E−08 |
| 9041_Chr20_47791131_47791244 | Seq_GeCjCas9.OGB.20minus_chr17_4861104_4861127 | 95.65 | 23 | 5.00E−06 |
| 9345_Chr22_29847209_29847300 | Seq_GeCjCas9.OGB.20minus_chr17_4861104_4861127 | 100 | 23 | 2.00E−08 |
| 9345_Chr22_29847209_29847300 | Seq_GeCjCas9.OGB.20minus_chr17_4861104_4861127 | 95.65 | 23 | 4.00E−06 |
| 9352_Chr22_31657195_31657308 | Seq_GeCjCas9.OGB.20minus_chr17_4861104_4861127 | 100 | 23 | 2.00E−08 |
| 9378_Chr22_39847505_39847612 | Seq_GeCjCas9.OGB.20minus_chr17_4861104_4861127 | 100 | 23 | 2.00E−08 |
| 9385_Chr22_41341585_41341694 | Seq_GeCjCas9.OGB.20minus_chr2_61396269_61396292 | 95.65 | 23 | 5.00E−06 |
| 9393_Chr22_42647977_42648072 | Seq_GeCjCas9.OGB.20minus_chr5_31469254_31469277 | 95.65 | 23 | 4.00E−06 |
| 9393_Chr22_42647977_42648072 | Seq_GeCjCas9.OGB.20minus_chr2_19125299_19125322 | 95.65 | 23 | 4.00E−06 |
| 9393_Chr22_42647977_42648072 | Seq_GeCjCas9.OGB.20minus_chr12_633017_633040 | 95.65 | 23 | 4.00E−06 |
| 1513_Chr2_232501114_232501223 | Seq_GeCjCas9.OGB.20minus_chr17_4861104_4861127 | 100 | 22 | 7.00E−08 |
| 1672_Chr3_32692995_32693124 | Seq_GeCjCas9.OGB.20minus_chr17_4861104_4861127 | 100 | 22 | 9.00E−08 |
| 1672_Chr3_32692995_32693124 | Seq_GeCjCas9.OGB.20minus_chr17_4861104_4861127 | 100 | 22 | 9.00E−08 |
| 2381_Chr4_41066259_41066323 | Seq_GeCjCas9.OGB.20minus_chr9_91913001_91913024 | 95.45 | 22 | 1.00E−05 |
| 2381_Chr4_41066259_41066323 | Seq_GeCjCas9.OGB.20minus_chr7_146571708_146571731 | 95.45 | 22 | 1.00E−05 |
| 2637_Chr4_123398735_123398832 | Seq_GeCjCas9.OGB.20minus_chr11_55391880_55391903 | 100 | 22 | 7.00E−08 |
| 2713_Chr4_148579989_148580100 | Seq_GeCjCas9.OGB.20minus_chr17_4861104_4861127 | 100 | 22 | 8.00E−08 |
| 3081_Chr5_37367004_37367113 | Seq_GeCjCas9.OGB.20minus_chr2_61396269_61396292 | 100 | 22 | 7.00E−08 |
| 3095_Chr5_40817519_40817633 | Seq_GeCjCas9.OGB.20minus_chr17_4861104_4861127 | 100 | 22 | 8.00E−08 |
| 4085_Chr7_1117087_1117189 | Seq_GeCjCas9.OGB.20minus_chr8_141501469_141501492 | 100 | 22 | 7.00E−08 |
| 5931_Chr10_100924520_100924608 | Seq_GeCjCas9.OGB.20minus_chr17_4861104_4861127 | 100 | 22 | 6.00E−08 |
| 6215_Chr11_45570011_45570123 | Seq_GeCjCas9.OGB.20minus_chr17_4861104_4861127 | 100 | 22 | 8.00E−08 |
| 6222_Chr11_48829963_48830063 | Seq_GeCjCas9.OGB.20minus_chr17_22261284_22261307 | 100 | 22 | 7.00E−08 |
| 6251_Chr11_62746325_62746440 | Seq_GeCjCas9.OGB.20minus_chr2_61396269_61396292 | 100 | 22 | 8.00E−08 |
| 6871_Chr12_122174321_122174450 | Seq_GeCjCas9.OGB.20minus_chr2_61396269_61396292 | 100 | 22 | 9.00E−08 |
| 7342_Chr14_28266246_28266360 | Seq_GeCjCas9.OGB.20minus_chr17_4861104_4861127 | 100 | 22 | 8.00E−08 |
| 7936_Chr16_21584700_21584808 | Seq_GeCjCas9.OGB.20minus_chr17_4861104_4861127 | 100 | 22 | 7.00E−08 |
| 8012_Chr16_67844992_67845092 | Seq_GeCjCas9.OGB.20minus_chr8_141501469_141501492 | 100 | 22 | 7.00E−08 |
| 8022_Chr16_72062630_72062754 | Seq_GeCjCas9.OGB.20minus_chr17_4861104_4861127 | 100 | 22 | 9.00E−08 |
| 8204_Chr17_19149239_19149347 | Seq_GeCjCas9.OGB.20minus_chr22_24409925_24409948 | 100 | 22 | 7.00E−08 |
| 8218_Chr17_29052153_29052275 | Seq_GeCjCas9.OGB.20minus_chr8_141501469_141501492 | 100 | 22 | 8.00E−08 |
| 8376_Chr17_76278190_76278306 | Seq_GeCjCas9.OGB.20minus_chr17_4861104_4861127 | 100 | 22 | 8.00E−08 |
| 8378_Chr17_76790747_76790854 | Seq_GeCjCas9.OGB.20minus_chr17_4861104_4861127 | 100 | 22 | 7.00E−08 |
| 8773_Chr19_24585850_24585981 | Seq_GeCjCas9.OGB.20minus_chr7_61968711_61968734 | 100 | 22 | 9.00E−08 |
| 9385_Chr22_41341585_41341694 | Seq_GeCjCas9.OGB.20minus_chr8_141501469_141501492 | 100 | 22 | 7.00E−08 |
| 9397_Chr22_43417966_43418096 | Seq_GeCjCas9.OGB.20minus_chr17_4861104_4861127 | 100 | 22 | 9.00E−08 |
| 9397_Chr22_43417966_43418096 | Seq_GeCjCas9.OGB.20minus_chr17_4861104_4861127 | 100 | 22 | 9.00E−08 |

^{A}first the SEQ ID NO is shown and is concatenated with the chromosome position were this human CRISPR receded in the reference human Hg19 genome;
^{B}first mentions that the DSB break site is found at the exact same position during C. jejuni infection and plasmid transfection of U2OS cells and is CjCas9 dependent. This ID is concatenated to the genome position were this break occurred;
^{C}shows the match in percentage of the human CRISPR sequence with the break site;
^{D}shows the number of nucleotides in base pairs of the human CRISPRs that exactly match with the break site;
^{E}shows the significance of CRISPR match with the break site.

### Example 6

### Human CRISPR Transcription is Influenced by (a)biotic Compounds Including Medicine

[0061] The more than 35.000 human gene targets as defined in Example 1 that are under transcription regulation control of the human CRISPRs were uploaded into the Ingenuity pathway analysis (IPA) software and established important roles in a wide variety of cellular and tissue functions and disease, which are visualized in a Top list presented in (Table 3) and a more detailed list presented in (Table 4).

TABLE 3
Top list on the role of the human CRISPRs and their gene targets
in disease, development and cellular functions.
Top Diseases and Functions

Nervous System Development and Function, Tissue Morphology, Embryonic Development
Cancer, Gastrointestinal Disease, Organismal Injury and Abnormalities
Developmental Disorder, Hereditary Disorder, Neurological Disease
Cell Signaling, Cell Death and Survival, Neurological Disease
Connective Tissue Disorders, Developmental Disorder, Skeletal and Muscular Disorders
Cell-To-Cell Signaling and Interaction, Cell Signaling, Vitamin and Mineral Metabolism
Drug Metabolism, Endocrine System Development and Function, Lipid Metabolism
Immunological Disease, Connective Tissue Disorders, Cell-To-Cell Signaling and Interaction
Cellular Compromise, Cellular Function and Maintenance, Connective Tissue Disorders
Lipid Metabolism, Small Molecule Biochemistry, Developmental Disorder
Neurological Disease, Organismal Injury and Abnormalities, Nervous System Development and Function
Cellular Development, Cellular Growth and Proliferation, Embryonic Development
Humoral Immune Response, Lymphoid Tissue Structure and Development, Cell-mediated Immune Response
Cellular Development, Cancer, Cell Cycle
Cellular Assembly and Organization, Cellular Movement, Gene Expression
Hematological Disease, Cell Death and Survival, Cellular Assembly and Organization
Gastrointestinal Disease, Organismal Injury and Abnormalities, Carbohydrate Metabolism
Cellular Assembly and Organization, Cellular Function and Maintenance, Developmental Disorder
Cellular Compromise, Developmental Disorder, Organismal Injury and Abnormalities
Lipid Metabolism, Small Molecule Biochemistry, Cell-To-Cell Signaling and Interaction
Hereditary Disorder, Neurological Disease, Organismal Injury and Abnormalities
Organismal Injury and Abnormalities, Reproductive System Disease, Cellular Function and Maintenance
Cellular Development, Cellular Growth and Proliferation, Nervous System Development and Function
Cell-To-Cell Signaling and Interaction, Cellular Assembly and Organization, Cellular Development
Developmental Disorder, Hereditary Disorder, Neurological Disease
The ±35.000 human genes that harbored a significant BLAST hit with the human CRISPRs were uploaded in ingenuity pathway analyses and provided a Top list of diseases, development and other functions in which these genes are involved

TABLE 4
Detailed list on the role of the human CRISPRs and their gene targets in disease, development and cellular functions.

| Nr | | Diseases or Functions | p- |
|---|---|---|---|
| ID^{A} | Categories^{B} | Annotation^{B} | Value^{C} |
| 3 | Gastrointestinal Disease, Hepatic System Disease, Organismal Injury and | liver lesion | 6.78E−23 |
| | Abnormalities | | |
| 4 | Cancer, Gastrointestinal Disease, Hepatic System Disease, Organismal Injury and | hepatobiliary system | 2.45E−22 |
| | Abnormalities | cancer | |
| 5 | Cancer, Gastrointestinal Disease, Hepatic System Disease, Organismal Injury and | liver tumor | 5.36E−22 |
| | Abnormalities | | |
| 6 | Cancer, Gastrointestinal Disease, Hepatic System Disease, Organismal Injury and | liver cancer | 6.80E−22 |
| | Abnormalities | | |
| 7 | Cancer, Organismal Injury and Abnormalities, Reproductive System Disease | endometrial carcinoma | 5.00E−21 |
| 8 | Cancer, Gastrointestinal Disease, Organismal Injury and Abnormalities | digestive organ tumor | 6.95E−21 |
| 9 | Cancer, Gastrointestinal Disease, Organismal Injury and Abnormalities | digestive system cancer | 1.03E−20 |
| 10 | Cancer, Dermatological Diseases and Conditions, Organismal Injury and | malignant cutaneous | 3.84E−20 |
| | Abnormalities | melanoma cancer | |
| 11 | Cancer, Organismal Injury and Abnormalities, Reproductive System Disease | adenocarcinoma in | 3.96E−20 |
| | | endometrium | |
| 12 | Cancer, Organismal Injury and Abnormalities, Reproductive System Disease | uterine carcinoma | 4.68E−20 |
| 13 | Cancer, Organismal Injury and Abnormalities | malignant solid tumor | 6.91E−20 |
| 14 | Cancer, Organismal Injury and Abnormalities | melanoma | 1.07E−19 |
| 15 | Cancer, Gastrointestinal Disease, Organismal Injury and Abnormalities | gastrointestinal tract | 1.37E−19 |
| | | cancer | |
| 16 | Cancer, Dermatological Diseases and Conditions, Organismal Injury and | skin cancer | 1.94E−19 |
| | Abnormalities | | |
| 17 | Cancer, Gastrointestinal Disease, Organismal Injury and Abnormalities | Gastrointestinal Tract | 2.60E−19 |
| | | Cancer and Tumors | |
| 18 | Cancer, Dermatological Diseases and Conditions, Organismal Injury and | skin tumor | 2.78E−19 |
| | Abnormalities | | |
| 19 | Cancer, Organismal Injury and Abnormalities | abdominal neoplasm | 3.45E−19 |
| 20 | Cancer, Organismal Injury and Abnormalities | cancer | 8.19E−19 |
| 21 | Cancer, Organismal Injury and Abnormalities, Reproductive System Disease | endometrial cancer | 1.09E−18 |
| 22 | Cancer, Gastrointestinal Disease, Organismal Injury and Abnormalities | intestinal tumor | 1.15E−18 |
| 23 | Cancer, Gastrointestinal Disease, Organismal Injury and Abnormalities | large intestine neoplasm | 1.70E−18 |
| 24 | Cancer, Organismal Injury and Abnormalities | abdominal cancer | 1.79E−18 |
| 25 | Cancer, Organismal Injury and Abnormalities | neoplasia of epithelial | 1.98E−18 |
| | | tissue | |
| 26 | Cancer, Gastrointestinal Disease, Organismal Injury and Abnormalities | intestinal cancer | 2.61E−18 |
| 27 | Cancer, Gastrointestinal Disease, Organismal Injury and Abnormalities | malignant neoplasm of | 4.70E−18 |
| | | large intestine | |
| 28 | Cancer, Organismal Injury and Abnormalities | epithelial cancer | 4.86E−18 |
| 29 | Cancer, Organismal Injury and Abnormalities | endometrioid carcinoma | 4.99E−18 |
| 30 | Cancer, Organismal Injury and Abnormalities | tumorigenesis of tissue | 1.22E−17 |
| 31 | Cancer, Organismal Injury and Abnormalities, Reproductive System Disease | uterine cancer | 2.31E−17 |
| 32 | Cancer, Organismal Injury and Abnormalities | abdominal | 2.67E−17 |
| | | adenocarcinoma | |
| 33 | Cancer, Organismal Injury and Abnormalities, Reproductive System Disease | female genital tract | 3.03E−17 |
| | | adenocarcinoma | |
| 34 | Cancer, Organismal Injury and Abnormalities | adenocarcinoma | 3.47E−17 |
| 35 | Cancer, Organismal Injury and Abnormalities, Reproductive System Disease | uterine tumor | 4.42E−17 |
| 36 | Cancer, Organismal Injury and Abnormalities | abdominal carcinoma | 7.09E−17 |
| 37 | Cancer, Organismal Injury and Abnormalities, Reproductive System Disease | genital tract cancer | 5.23E−16 |
| 38 | Cancer, Organismal Injury and Abnormalities | genitourinary carcinoma | 7.79E−16 |
| 39 | Cancer, Organismal Injury and Abnormalities, Reproductive System Disease | female genital tract | 3.83E−15 |
| | | cancer | |
| 40 | Cancer, Organismal Injury and Abnormalities, Reproductive System Disease | genital tumor | 7.72E−15 |
| 41 | Cancer, Organismal Injury and Abnormalities, Reproductive System Disease | tumorigenesis of genital | 1.66E−14 |
| | | organ | |
| 42 | Cancer, Organismal Injury and Abnormalities | pelvic cancer | 2.34E−14 |
| 43 | Cancer, Organismal Injury and Abnormalities, Reproductive System Disease | female genital neoplasm | 2.51E−14 |
| 44 | Cancer, Organismal Injury and Abnormalities, Reproductive System Disease | tumorigenesis of | 5.21E−14 |
| | | reproductive tract | |
| 45 | Cancer, Organismal Injury and Abnormalities | cancer of secretory | 1.19E−13 |
| | | structure | |
| 46 | Cancer, Organismal Injury and Abnormalities | urogenital cancer | 1.22E−13 |
| 47 | Cancer, Gastrointestinal Disease, Organismal Injury and Abnormalities | gastrointestinal | 2.08E−13 |
| | | carcinoma | |
| 48 | Cancer, Gastrointestinal Disease, Organismal Injury and Abnormalities | gastrointestinal | 2.52E−13 |
| | | adenocarcinoma | |
| 49 | Cancer, Gastrointestinal Disease, Organismal Injury and Abnormalities | gastroesophageal | 3.42E−13 |
| | | adenocarcinoma | |
| 50 | Cancer, Gastrointestinal Disease, Organismal Injury and Abnormalities | upper gastrointestinal | 7.69E−13 |
| | | tract cancer | |
| 51 | Cancer, Dermatological Diseases and Conditions, Organismal Injury and | squamous cell skin cancer | 8.03E−13 |
| | Abnormalities | | |
| 52 | Cancer, Gastrointestinal Disease, Organismal Injury and Abnormalities | gastroesophageal cancer | 1.44E−12 |
| 53 | Cancer, Organismal Injury and Abnormalities | ductal carcinoma | 1.73E−12 |
| 54 | Cancer, Gastrointestinal Disease, Organismal Injury and Abnormalities | gastroesophageal | 2.00E−12 |
| | | carcinoma | |
| 55 | Cancer, Endocrine System Disorders, Gastrointestinal Disease, Organismal Injury | ductal pancreatic | 2.49E−12 |
| | and Abnormalities | carcinoma | |
| 56 | Cancer, Endocrine System Disorders, Gastrointestinal Disease, Organismal Injury | pancreatic tumor | 3.40E−12 |
| | and Abnormalities | | |
| 57 | Cancer, Dermatological Diseases and Conditions, Organismal Injury and | skin carcinoma | 4.64E−12 |
| | Abnormalities | | |
| 58 | Gastrointestinal Disease | gastric lesion | 5.86E−12 |
| 59 | Cancer, Gastrointestinal Disease, Organismal Injury and Abnormalities | gastric cancer | 7.02E−12 |
| 60 | Cancer, Organismal Injury and Abnormalities, Respiratory Disease | lung tumor | 2.54E−11 |
| 61 | Cancer, Organismal Injury and Abnormalities | thoracic neoplasm | 2.55E−11 |
| 62 | Cancer, Organismal Injury and Abnormalities | breast or colorectal cancer | 3.13E−11 |
| 63 | Cancer, Organismal Injury and Abnormalities, Respiratory Disease | lung cancer | 5.69E−11 |
| 64 | Cancer, Endocrine System Disorders, Gastrointestinal Disease, Organismal Injury | pancreatic cancer | 5.82E−11 |
| | and Abnormalities | | |
| 65 | Inflammatory Disease | chronic inflammatory | 1.30E−10 |
| | | disorder | |
| 66 | Cancer, Organismal Injury and Abnormalities, Respiratory Disease | non-small cell lung cancer | 1.53E−10 |
| 67 | Cancer, Gastrointestinal Disease, Organismal Injury and Abnormalities | gastric adenocarcinoma | 1.63E−10 |
| 68 | Cancer, Organismal Injury and Abnormalities | malignant connective or | 2.65E−10 |
| | | soft tissue neoplasm | |
| 69 | Cancer, Gastrointestinal Disease, Organismal Injury and Abnormalities | colorectal carcinoma | 2.73E−10 |
| 70 | Cancer, Gastrointestinal Disease, Organismal Injury and Abnormalities | gastric carcinoma | 3.08E−10 |
| 71 | Cancer, Organismal Injury and Abnormalities, Respiratory Disease | carcinoma in lung | 3.08E−10 |
| 72 | Cancer, Gastrointestinal Disease, Organismal Injury and Abnormalities | colon carcinoma | 3.97E−10 |
| 73 | Cancer, Organismal Injury and Abnormalities | connective or soft tissue | 4.52E−10 |
| | | tumor | |
| 74 | Cancer, Gastrointestinal Disease, Organismal Injury and Abnormalities | intestinal adenocarcinoma | 5.01E−10 |
| 75 | Cancer, Organismal Injury and Abnormalities, Skeletal and Muscular Disorders | embryonal | 5.36E−10 |
| | | rhabdomyosarcoma | |
| 76 | Cancer, Gastrointestinal Disease, Organismal Injury and Abnormalities | colon adenocarcinoma | 8.20E−10 |
| 77 | Cancer, Gastrointestinal Disease, Organismal Injury and Abnormalities | colorectal adenocarcinoma | 9.26E−10 |
| 78 | Cancer, Organismal Injury and Abnormalities | connective tissue tumor | 9.71E−10 |
| 79 | Cancer, Organismal Injury and Abnormalities | sarcoma | 1.13E−09 |
| 80 | Cancer, Gastrointestinal Disease, Organismal Injury and Abnormalities | colon tumor | 2.01E−09 |
| 81 | Cancer, Gastrointestinal Disease, Organismal Injury and Abnormalities | colorectal neoplasia | 2.08E−09 |
| 82 | Behavior | behavior | 2.19E−09 |
| 83 | Organismal Development | abnormal morphology of | 2.23E−09 |
| | | head | |
| 84 | Cancer, Gastrointestinal Disease, Organismal Injury and Abnormalities | colorectal cancer | 2.28E−09 |
| 85 | Cell Morphology, Cellular Assembly and Organization, Cellular Function and | formation of cellular | 2.32E−09 |
| | Maintenance | protrusions | |
| 86 | Endocrine System Disorders, Gastrointestinal Disease, Metabolic Disease | diabetes mellitus | 2.54E−09 |
| 87 | Cancer, Organismal Injury and Abnormalities, Skeletal and Muscular Disorders | muscle tumor | 3.04E−09 |
| 88 | Immunological Disease | systemic autoimmune | 3.34E−09 |
| | | syndrome | |
| 89 | Organismal Development | morphology of head | 3.62E−09 |
| 90 | Cancer, Organismal Injury and Abnormalities, Skeletal and Muscular Disorders | myosarcoma | 3.98E−09 |
| 91 | Cancer, Gastrointestinal Disease, Organismal Injury and Abnormalities | colon cancer | 4.47E−09 |
| 92 | Cellular Growth and Proliferation, Tissue Development | generation of cells | 4.93E−09 |
| 93 | Cancer, Organismal Injury and Abnormalities, Skeletal and Muscular Disorders | rhabdomyosarcoma | 5.19E−09 |
| 94 | Psychological Disorders | Mood Disorders | 6.48E−09 |
| 95 | Nervous System Development and Function | morphology of nervous | 1.08E−08 |
| | | system | |
| 96 | Nervous System Development and Function | abnormal morphology of | 1.27E−08 |
| | | nervous system | |
| 97 | Cancer, Organismal Injury and Abnormalities | breast or ovarian | 1.41E−08 |
| | | carcinoma | |
| 98 | Hereditary Disorder, Organismal Injury and Abnormalities | autosomal recessive | 1.47E−08 |
| | | disease | |
| 99 | Cellular Development, Cellular Growth and Proliferation, Nervous System | development of neurons | 2.39E−08 |
| | Development and Function, Tissue Development | | |
| 100 | Organismal Survival | organismal death | 2.70E−08 |
| 101 | Cancer, Organismal Injury and Abnormalities | liquid tumor | 2.72E−08 |
| 102 | Nervous System Development and Function | development of central | 2.96E−08 |
| | | nervous system | |
| 103 | Cancer, Organismal Injury and Abnormalities | malignant neoplasm of | 3.08E−08 |
| | | aerodigestive tract | |
| 104 | Metabolic Disease | glucose metabolism | 3.40E−08 |
| | | disorder | |
| 105 | Cancer, Organismal Injury and Abnormalities | cancer of cells | 4.39E−08 |
| 106 | Connective Tissue Disorders, Immunological Disease, Inflammatory Disease, | rheumatoid arthritis | 6.06E−08 |
| | Inflammatory Response, Skeletal and Muscular Disorders | | |
| 107 | Cancer, Organismal Injury and Abnormalities | soft tissue neoplasm | 7.16E−08 |
| 108 | Lipid Metabolism, Small Molecule Biochemistry | fatty acid metabolism | 8.61E−08 |
| 109 | Cancer, Organismal Injury and Abnormalities, Reproductive System Disease | breast or ovarian cancer | 1.05E−07 |
| 110 | Embryonic Development, Organismal Development | development of head | 1.12E−07 |
| 111 | Behavior | cognition | 1.31E−07 |
| 112 | Organismal Injury and Abnormalities | Organ Degeneration | 1.35E−07 |
| 113 | Cancer, Organismal Injury and Abnormalities | upper aerodigestive tract | 1.37E−07 |
| | | carcinoma | |
| 114 | Neurological Disease, Organismal Injury and Abnormalities | gliosis | 1.53E−07 |
| 115 | Embryonic Development, Organismal Development | development of body axis | 1.66E−07 |
| 116 | Cancer, Hematological Disease, Immunological Disease, Organismal Injury and | acute leukemia | 1.87E−07 |
| | Abnormalities | | |
| 117 | Neurological Disease, Psychological Disorders | bipolar disorder | 1.92E−07 |
| 118 | Cardiovascular Disease | peripheral vascular | 1.98E−07 |
| | | disease | |
| 119 | Behavior | learning | 2.01E−07 |
| 120 | Cancer, Hematological Disease, Immunological Disease, Organismal Injury and | leukemia | 2.08E−07 |
| | Abnormalities | | |
| 121 | Cancer, Organismal Injury and Abnormalities | squamous-cell carcinoma | 2.15E−07 |
| 122 | Cellular Assembly and Organization | formation of cellular | 2.57E−07 |
| | | membrane | |
| 123 | Cell-To-Cell Signaling and Interaction, Cellular Assembly and Organization, | developmental process of | 2.76E−07 |
| | Cellular Development, Cellular Function and Maintenance, Cellular Growth and | synapse | |
| | Proliferation, Nervous System Development and Function, Tissue Development | | |
| 124 | Neurological Disease | Movement Disorders | 3.10E−07 |
| 125 | Cellular Assembly and Organization, Cellular Function and Maintenance | microtubule dynamics | 3.14E−07 |
| 126 | Neurological Disease | neurodegeneration of | 3.26E−07 |
| | | central nervous system | |
| 127 | Cancer, Gastrointestinal Disease, Organismal Injury and Abnormalities | esophageal | 3.60E−07 |
| | | adenocarcinoma | |
| 128 | Cellular Assembly and Organization, Cellular Function and Maintenance | organization of cytoplasm | 3.75E−07 |
| 129 | Cell Morphology | abnormal morphology of | 3.79E−07 |
| | | cells | |
| 130 | Cell-To-Cell Signaling and Interaction, Cellular Assembly and Organization, | assembly of intercellular | 4.67E−07 |
| | Cellular Function and Maintenance | junctions | |
| 131 | Nervous System Development and Function, Organ Morphology, Organismal | morphology of brain | 5.23E−07 |
| | Development | | |
| 132 | Cancer, Gastrointestinal Disease, Organismal Injury and Abnormalities | esophageal carcinoma | 5.41E−07 |
| 133 | Psychological Disorders | major affective disorder | 5.86E−07 |
| 134 | Connective Tissue Disorders, Skeletal and Muscular Disorders | arthropathy | 6.20E−07 |
| 135 | Nervous System Development and Function, Organ Morphology, Organismal | abnormal morphology of | 6.33E−07 |
| | Development | brain | |
| 136 | Cellular Assembly and Organization | formation of plasma | 7.44E−07 |
| | | membrane | |
| 137 | Cancer, Endocrine System Disorders, Organismal Injury and Abnormalities, | Ovarian Cancer and | 7.72E−07 |
| | Reproductive System Disease | Tumors | |
| 138 | Cancer, Organismal Injury and Abnormalities | Lymphoid Cancer and | 8.03E−07 |
| | | Tumors | |
| 139 | Cancer, Endocrine System Disorders, Organismal Injury and Abnormalities, | epithelial ovarian cancer | 9.85E−07 |
| | Reproductive System Disease | | |
| 140 | Cancer, Hematological Disease, Immunological Disease, Organismal Injury and | hematological neoplasia | 1.09E−06 |
| | Abnormalities | | |
| 141 | Cellular Assembly and Organization, Cellular Function and Maintenance | organization of | 1.41E−06 |
| | | cytoskeleton | |
| 142 | Cancer, Endocrine System Disorders, Organismal Injury and Abnormalities, | gonadal tumor | 1.45E−06 |
| | Reproductive System Disease | | |
| 143 | Embryonic Development, Nervous System Development and Function, Organ | formation of brain | 1.57E−06 |
| | Development, Organismal Development, Tissue Development | | |
| 144 | Embryonic Development, Organismal Development | development of body | 1.76E−06 |
| | | trunk | |
| 145 | Cancer, Gastrointestinal Disease, Organismal Injury and Abnormalities | esophageal cancer | 1.77E−06 |
| 146 | Molecular Transport | transport of molecule | 1.86E−06 |
| 147 | Neurological Disease, Organismal Injury and Abnormalities | neurodegeneration of | 1.86E−06 |
| | | brain | |
| 148 | Connective Tissue Disorders, Inflammatory Disease, Inflammatory Response, | inflammation of joint | 2.11E−06 |
| | Skeletal and Muscular Disorders | | |
| 149 | Neurological Disease, Organismal Injury and Abnormalities | reactive astrogliosis | 2.17E−06 |
| 150 | Organismal Injury and Abnormalities | discomfort | 2.60E−06 |
| 151 | Cancer, Endocrine System Disorders, Organismal Injury and Abnormalities, | ovarian cancer | 2.68E−06 |
| | Reproductive System Disease | | |
| 152 | Cancer, Hematological Disease, Immunological Disease, Organismal Injury and | myeloid neoplasm | 2.76E−06 |
| | Abnormalities | | |
| 153 | Psychological Disorders | depressive disorder | 2.87E−06 |
| 154 | Organismal Injury and Abnormalities, Renal and Urological Disease | renal impairment | 3.23E−06 |
| 155 | Organismal Injury and Abnormalities | intracranial hemorrhage | 3.31E−06 |
| 156 | Cancer, Hematological Disease, Immunological Disease, Organismal Injury and | lymphoid cancer | 3.35E−06 |
| | Abnormalities | | |
| 157 | Psychological Disorders | schizophrenia spectrum | 3.48E−06 |
| | | disorder | |
| 158 | Cancer, Cardiovascular Disease, Organismal Injury and Abnormalities | hemangioma | 3.63E−06 |
| 159 | Nervous System Development and Function, Tissue Morphology | quantity of neurons | 3.69E−06 |
| 160 | Cardiovascular Disease | Hypertension | 3.88E−06 |
| 161 | Developmental Disorder | multiple congenital | 4.01E−06 |
| | | anomalies | |
| 162 | Organismal Development | abnormal morphology of | 4.30E−06 |
| | | body cavity | |
| 163 | Cell-To-Cell Signaling and Interaction | cell-cell adhesion | 4.35E−06 |
| 164 | Cardiovascular Disease | occlusion of artery | 4.53E−06 |
| 165 | Cancer, Hematological Disease, Immunological Disease, Organismal Injury and | myeloproliferative | 5.15E−06 |
| | Abnormalities | disorder | |
| 166 | Cancer, Organismal Injury and Abnormalities, Respiratory Disease | squamous cell lung cancer | 6.13E−06 |
| 167 | Cardiovascular Disease, Organismal Injury and Abnormalities | coronary disease | 6.36E−06 |
| 168 | Organismal Development | abnormal morphology of | 6.60E−06 |
| | | thoracic cavity | |
| 169 | Cancer, Cardiovascular Disease, Organismal Injury and Abnormalities | capillary hemangioma | 7.36E−06 |
| 170 | Organismal Injury and Abnormalities, Renal and Urological Disease | failure of kidney | 8.03E−06 |
| 171 | Organismal Injury and Abnormalities, Renal and Urological Disease | benign renal mass | 8.08E−06 |
| 172 | Organismal Development | morphology of body cavity | 8.32E−06 |
| 173 | Cancer, Endocrine System Disorders, Organismal Injury and Abnormalities, | ovarian adenocarcinoma | 9.35E−06 |
| | Reproductive System Disease | | |
| 174 | Cell Morphology | abnormal morphology of | 9.59E−06 |
| | | plasma membrane | |
| 175 | Cancer, Organismal Injury and Abnormalities, Reproductive System Disease | carcinoma in breast | 9.87E−06 |
| 176 | Cardiovascular Disease, Organismal Injury and Abnormalities | carotid artery stenosis | 9.88E−06 |
| 177 | Connective Tissue Disorders, Inflammatory Disease, Skeletal and Muscular | Rheumatic Disease | 9.91E−06 |
| | Disorders | | |
| 178 | Cardiovascular Disease | microangiopathy | 9.96E−06 |
| 179 | Cardiovascular Disease, Organismal Injury and Abnormalities | stenosis of aortic valve | 1.06E−05 |
| 180 | Organismal Injury and Abnormalities, Reproductive System Disease | prostatic disease | 1.07E−05 |
| 181 | Cardiovascular Disease, Organismal Injury and Abnormalities | valvulopathy | 1.11E−05 |
| 182 | Cancer, Hematological Disease, Immunological Disease, Organismal Injury and | lymphocytic leukemia | 1.14E−05 |
| | Abnormalities | | |
| 183 | Cell-To-Cell Signaling and Interaction, Nervous System Development and | neurotransmission | 1.18E−05 |
| | Function | | |
| 184 | Cancer, Hematological Disease, Immunological Disease, Organismal Injury and | hematologic cancer | 1.33E−05 |
| | Abnormalities | | |
| 185 | Tissue Morphology | quantity of cells | 1.37E−05 |
| 186 | Neurological Disease, Organismal Injury and Abnormalities | astrocytosis | 1.41E−05 |
| 187 | Cell Morphology | morphology of cells | 1.46E−05 |
| 188 | Cancer, Organismal Injury and Abnormalities, Reproductive System Disease | male genital neoplasm | 1.56E−05 |
| 189 | Cancer, Organismal Injury and Abnormalities, Reproductive System Disease | Prostate Cancer and | 1.58E−05 |
| | | Tumors | |
| 190 | Cell Morphology, Cellular Assembly and Organization, Cellular Development, | formation of plasma | 1.68E−05 |
| | Cellular Function and Maintenance, Cellular Growth and Proliferation | membrane projections | |
| 191 | Organismal Injury and Abnormalities, Renal and Urological Disease | end-stage chronic kidney | 1.68E−05 |
| | | disease | |
| 192 | Organismal Injury and Abnormalities, Renal and Urological Disease | end-stage renal failure | 1.68E−05 |
| 193 | Cancer, Endocrine System Disorders, Organismal Injury and Abnormalities, | endometrioid ovarian | 1.72E−05 |
| | Reproductive System Disease | cancer | |
| 194 | Cancer, Organismal Injury and Abnormalities, Respiratory Disease | non small cell lung | 1.73E−05 |
| | | adenocarcinoma | |
| 195 | Cancer, Organismal Injury and Abnormalities, Reproductive System Disease | prostate cancer | 1.75E−05 |
| 196 | Organismal Injury and Abnormalities | Cytosis | 1.80E−05 |
| 197 | Cardiovascular Disease | atherosclerosis | 1.82E−05 |
| 198 | Organismal Injury and Abnormalities, Renal and Urological Disease | chronic renal failure | 1.97E−05 |
| 199 | Neurological Disease | seizure disorder | 1.97E−05 |
| 200 | Cancer, Cardiovascular Disease, Organismal Injury and Abnormalities | hemangioblastoma | 2.03E−05 |
| 201 | Hereditary Disorder, Neurological Disease, Organismal Injury and Abnormalities, | schizophreniform | 2.08E−05 |
| | Psychological Disorders | psychosis | |
| 202 | Cancer, Organismal Injury and Abnormalities, Reproductive System Disease | breast cancer | 2.19E−05 |
| 203 | Neurological Disease, Psychological Disorders | autism | 2.38E−05 |
| 204 | Cancer, Endocrine System Disorders, Organismal Injury and Abnormalities, | adenosquamous ovarian | 2.44E−05 |
| | Reproductive System Disease | cancer | |
| 205 | Cardiovascular Disease, Organismal Injury and Abnormalities | coronary artery disease | 2.44E−05 |
| 206 | Cancer, Organismal Injury and Abnormalities, Reproductive System Disease | malignant neoplasm of | 2.71E−05 |
| | | male genital organ | |
| 207 | Cancer, Organismal Injury and Abnormalities, Reproductive System Disease | mammary tumor | 2.86E−05 |
| 208 | Cellular Assembly and Organization | organization of cellular | 2.92E−05 |
| | | membrane | |
| 209 | Psychological Disorders | alcoholism | 3.38E−05 |
| 210 | Neurological Disease, Psychological Disorders | Schizophrenia | 3.43E−05 |
| 211 | Ophthalmic Disease, Organismal Injury and Abnormalities | degeneration of eye | 3.55E−05 |
| 212 | Cancer, Hematological Disease, Immunological Disease, Organismal Injury and | myeloid leukemia | 3.60E−05 |
| | Abnormalities | | |
| 213 | Tissue Development | development of epithelial | 3.90E−05 |
| | | tissue | |
| 214 | Cardiovascular Disease, Organismal Injury and Abnormalities | valvular regurgitation of | 4.17E−05 |
| | | atrioventricular valve | |
| 215 | Cancer, Organismal Injury and Abnormalities | metastasis | 4.46E−05 |
| 216 | Organismal Injury and Abnormalities, Renal and Urological Disease | end stage renal disease | 4.46E−05 |
| 217 | Psychological Disorders | Substance-Related | 4.60E−05 |
| | | Disorders | |
| 218 | Psychological Disorders | drug dependence | 4.73E−05 |
| 219 | Cell Morphology, Nervous System Development and Function | innervation | 5.01E−05 |
| 220 | Neurological Disease | hydrocephalus | 5.05E−05 |
| 221 | Cellular Development, Cellular Growth and Proliferation | cell proliferation of tumor | 5.06E−05 |
| | | cell lines | |
| 222 | Cell Death and Survival | killing of leukemia cell | 5.10E−05 |
| | | lines | |
| 223 | Infectious Diseases | infection by Retroviridae | 5.21E−05 |
| 224 | Hereditary Disorder, Neurological Disease, Organismal Injury and Abnormalities, | schizoaffective disorder | 5.23E−05 |
| | Psychological Disorders | | |
| 225 | Cancer, Neurological Disease, Organismal Injury and Abnormalities | glioblastoma cancer | 5.27E−05 |
| 226 | Hereditary Disorder, Organismal Injury and Abnormalities | autosomal dominant | 5.52E−05 |
| | | disease | |
| 227 | Cancer, Hematological Disease, Immunological Disease, Organismal Injury and | acute myeloid leukemia | 5.58E−05 |
| | Abnormalities | with PKC412 resistance | |
| 228 | Gastrointestinal Disease, Inflammatory Disease | Crohn's disease | 5.62E−05 |
| 229 | Behavior | social behavior | 5.63E−05 |
| 230 | Energy Production, Lipid Metabolism, Small Molecule Biochemistry | oxidation of lipid | 5.77E−05 |
| 231 | Hereditary Disorder, Neurological Disease, Organismal Injury and Abnormalities | idiopathic generalized | 5.96E−05 |
| | | epilepsy | |
| 232 | Cancer, Organismal Injury and Abnormalities, Respiratory Disease | tumor antigen-positive | 5.96E−05 |
| | | non-small cell lung cancer | |
| 233 | Gastrointestinal Disease, Inflammatory Disease | Inflammatory Bowel | 5.98E−05 |
| | | Disease | |
| 234 | Developmental Disorder, Organismal Injury and Abnormalities | congenital malformation | 6.00E−05 |
| | | of genitourinary system | |
| 235 | Cancer, Organismal Injury and Abnormalities | growth of tumor | 6.05E−05 |
| 236 | Cardiovascular Disease, Neurological Disease | cerebrovascular | 6.12E−05 |
| | | dysfunction | |
| 237 | Neurological Disease | neurological signs | 6.37E−05 |
| 238 | Cardiovascular Disease | carotid artery disease | 6.50E−05 |
| 239 | Cell Morphology, Cellular Assembly and Organization, Cellular Development, | neuritogenesis | 6.61E−05 |
| | Cellular Function and Maintenance, Cellular Growth and Proliferation, Nervous | | |
| | System Development and Function, Tissue Development | | |
| 240 | Neurological Disease | degeneration of nervous | 6.65E−05 |
| | | system | |
| 241 | Cell Morphology, Nervous System Development and Function, Tissue Morphology | abnormal morphology of | 6.66E−05 |
| | | neurons | |
| 242 | Behavior | hyperactivity | 6.81E−05 |
| 243 | Developmental Disorder, Organismal Injury and Abnormalities, Reproductive | congenital anomaly of | 7.38E−05 |
| | System Disease | genital system | |
| 244 | Cellular Compromise, Neurological Disease, Organismal Injury and Abnormalities | neurodegeneration of | 7.75E−05 |
| | | brain cells | |
| 245 | Cell Death and Survival, Cellular Compromise, Neurological Disease, Organismal | neurodegeneration of | 7.76E−05 |
| | Injury and Abnormalities, Tissue Morphology | Purkinje cells | |
| 246 | Cancer, Organismal Injury and Abnormalities | advanced malignant | 7.91E−05 |
| | | tumor | |
| 247 | Cancer, Hematological Disease, Immunological Disease, Organismal Injury and | acute lymphocytic | 8.08E−05 |
| | Abnormalities | leukemia | |
| 248 | Cell-To-Cell Signaling and Interaction, Nervous System Development and | synaptic transmission of | 8.79E−05 |
| | Function | cerebral cortex cells | |
| 249 | Ophthalmic Disease, Organismal Injury and Abnormalities | retinal degeneration | 8.92E−05 |
| 250 | Cancer, Gastrointestinal Disease, Hepatic System Disease, Organismal Injury and | malignant gallbladder | 9.24E−05 |
| | Abnormalities | neoplasia | |
| 251 | Endocrine System Disorders, Gastrointestinal Disease, Immunological Disease, | insulin-dependent | 9.71E−05 |
| | Metabolic Disease | diabetes mellitus | |
| 252 | Cellular Movement | cell movement | 9.74E−05 |
| 253 | Respiratory Disease | chronic obstructive | 9.75E−05 |
| | | pulmonary disease | |
| 254 | Cell-To-Cell Signaling and Interaction, Nervous System Development and | synaptic transmission | 9.77E−05 |
| | Function | | |
| 255 | Cell Morphology, Nervous System Development and Function, Tissue Morphology | morphology of neurons | 1.02E−04 |
| 256 | Infectious Diseases | infection by lentivirus | 1.05E−04 |
| 257 | Neurological Disease | generalized epilepsy | 1.06E−04 |
| 258 | Neurological Disease | dyskinesia | 1.18E−04 |
| 259 | Infectious Diseases | infection by RNA virus | 1.24E−04 |
| 260 | Molecular Transport | secretion of molecule | 1.25E−04 |
| 261 | Cancer, Gastrointestinal Disease, Hepatic System Disease, Organismal Injury and | biliary tract carcinoma | 1.26E−04 |
| | Abnormalities | | |
| 262 | Psychological Disorders | drug abuse | 1.26E−04 |
| 263 | Cardiovascular System Development and Function | development of | 1.28E−04 |
| | | vasculature | |
| 264 | Skeletal and Muscular System Development and Function | morphology of muscle | 1.32E−04 |
| 265 | Behavior | hypnosis | 1.36E−04 |
| 266 | Cellular Function and Maintenance | regulation of osteoclasts | 1.36E−04 |
| 267 | Organismal Survival | perinatal death | 1.36E−04 |
| 268 | Nervous System Development and Function, Organ Morphology, Organismal | abnormal morphology of | 1.40E−04 |
| | Development | cerebellum | |
| 269 | Neurological Disease | amyotrophic lateral | 1.41E−04 |
| | | sclerosis | |
| 270 | Cancer, Organismal Injury and Abnormalities | benign neoplasia | 1.50E−04 |
| 271 | Neurological Disease, Psychological Disorders | insomnia | 1.53E−04 |
| 272 | Cardiovascular System Development and Function | morphology of | 1.56E−04 |
| | | cardiovascular system | |
| 273 | Psychological Disorders | generalized anxiety | 1.58E−04 |
| | | disorder | |
| 274 | Cell-To-Cell Signaling and Interaction, Nervous System Development and | action potential of cells | 1.61E−04 |
| | Function | | |
| 275 | Skeletal and Muscular System Development and Function | quantity of bone | 1.61E−04 |
| 276 | Connective Tissue Disorders, Developmental Disorder, Skeletal and Muscular | pectus excavatum | 1.65E−04 |
| | Disorders | | |
| 277 | Cardiovascular System Development and Function | abnormal morphology of | 1.65E−04 |
| | | cardiovascular system | |
| 278 | Neurological Disease, Organismal Injury and Abnormalities | subarachnoid hemorrhage | 1.67E−04 |
| 279 | Cell-To-Cell Signaling and Interaction, Reproductive System Development and | binding of gonadal cell | 1.76E−04 |
| | Function | lines | |
| 280 | Behavior | locomotion | 1.83E−04 |
| 281 | Embryonic Development, Lymphoid Tissue Structure and Development, Organ | formation of lymph node | 1.92E−04 |
| | Development, Organismal Development, Tissue Development | | |
| 282 | Neurological Disease, Organismal Injury and Abnormalities | damage of brain | 1.95E−04 |
| 283 | Auditory Disease, Inflammatory Disease | otitis media | 1.96E−04 |
| 284 | Embryonic Development, Organismal Development | development of abdomen | 1.98E−04 |
| 285 | Organismal Functions | grasping | 1.98E−04 |
| 286 | Cell Signaling, Small Molecule Biochemistry, Vitamin and Mineral Metabolism | oscillation of Ca2+ | 1.98E−04 |
| 287 | Cell Death and Survival | neuronal cell death | 1.99E−04 |
| 288 | Lipid Metabolism, Small Molecule Biochemistry | synthesis of lipid | 2.03E−04 |
| 289 | Cell-To-Cell Signaling and Interaction, Humoral Immune Response, Inflammatory | immune response of B | 2.07E−04 |
| | Response | lymphocytes | |
| 290 | Neurological Disease, Respiratory Disease, Skeletal and Muscular Disorders | laryngismus | 2.07E−04 |
| 291 | Cancer, Endocrine System Disorders, Gastrointestinal Disease, Organismal Injury | pancreatic intraepithelial | 2.11E−04 |
| | and Abnormalities | neoplasia | |
| 292 | Embryonic Development, Organ Development, Organ Morphology, Organismal | abnormal morphology of | 2.15E−04 |
| | Development, Tissue Development, Tissue Morphology, Visual System | bruch membrane tissue | |
| | Development and Function | | |
| 293 | Organismal Injury and Abnormalities | low back pain | 2.18E−04 |
| 294 | Lipid Metabolism, Small Molecule Biochemistry | removal of lipid | 2.18E−04 |
| 295 | Infectious Diseases | HIV infection | 2.20E−04 |
| 296 | Gastrointestinal Disease | nausea | 2.33E−04 |
| 297 | Cellular Compromise | degeneration of cells | 2.34E−04 |
| 298 | Cell-To-Cell Signaling and Interaction, Nervous System Development and | long-term potentiation | 2.35E−04 |
| | Function | | |
| 299 | Nervous System Development and Function | abnormal morphology of | 2.36E−04 |
| | | cranial nerve | |
| 300 | Cancer, Gastrointestinal Disease, Hepatic System Disease, Organismal Injury and | gall bladder | 2.36E−04 |
| | Abnormalities | adenocarcinoma | |
| 301 | Developmental Disorder, Organismal Injury and Abnormalities, Reproductive | congenital malformation | 2.37E−04 |
| | System Disease | of genital organs | |
| 302 | Lipid Metabolism, Small Molecule Biochemistry | conversion of fatty acid | 2.41E−04 |
| 303 | Neurological Disease, Psychological Disorders | Sleep Disorders | 2.51E−04 |
| 304 | Organismal Injury and Abnormalities | Pathological Cyst | 2.52E−04 |
| 305 | Connective Tissue Disorders, Developmental Disorder, Organismal Development, | abnormal morphology of | 2.56E−04 |
| | Skeletal and Muscular Disorders | lip | |
| 306 | Cellular Function and Maintenance, Hematological System Development and | engulfment of pyrenocytes | 2.56E−04 |
| | Function, Hematopoiesis | | |
| 307 | Cardiovascular Disease, Infectious Diseases, Organismal Injury and | infection of heart | 2.56E−04 |
| | Abnormalities | | |
| 308 | Lipid Metabolism, Small Molecule Biochemistry | metabolism of | 2.56E−04 |
| | | galactosylceramide | |
| 309 | Lipid Metabolism, Small Molecule Biochemistry | metabolism of | 2.56E−04 |
| | | glucosylceramide | |
| 310 | Cell Cycle, Cellular Development | oncogene-induced | 2.56E−04 |
| | | senescence of melanocytes | |
| 311 | Behavior | emotional behavior | 2.77E−04 |
| 312 | Psychological Disorders | Psychosis | 2.88E−04 |
| 313 | Gastrointestinal Disease | chemotherapy sickness | 2.92E−04 |
| 314 | Organismal Injury and Abnormalities, Renal and Urological Disease | renal cyst | 2.94E−04 |
| 315 | Cancer, Gastrointestinal Disease, Organismal Injury and Abnormalities | cecum adenocarcinoma | 2.95E−04 |
| 316 | Neurological Disease | seizures | 3.07E−04 |
| 317 | Nervous System Development and Function, Organ Morphology, Organismal | abnormal morphology of | 3.08E−04 |
| | Development | telencephalon | |
| 318 | Connective Tissue Disorders, Dental Disease, Developmental Disorder, | dental caries | 3.11E−04 |
| | Gastrointestinal Disease, Skeletal and Muscular Disorders | | |
| 319 | Cellular Development, Cellular Growth and Proliferation, Hematological System | proliferation of TREG | 3.11E−04 |
| | Development and Function | cells | |
| 320 | Cardiovascular Disease, Organismal Injury and Abnormalities | valvular regurgitation of | 3.11E−04 |
| | | mitral valve | |
| 321 | Neurological Disease | absence seizure | 3.32E−04 |
| 322 | Hereditary Disorder, Organismal Injury and Abnormalities, Psychological | trichotillomania | 3.32E−04 |
| | Disorders | | |
| 323 | Connective Tissue Development and Function, Skeletal and Muscular System | quantity of bone cells | 3.36E−04 |
| | Development and Function, Tissue Morphology | | |
| 324 | Neurological Disease | progressive motor | 3.37E−04 |
| | | neuropathy | |
| 325 | Neurological Disease, Skeletal and Muscular Disorders | neuromuscular disease | 3.40E−04 |
| 326 | Cellular Development, Cellular Growth and Proliferation | cell proliferation of breast | 3.44E−04 |
| | | cancer cell lines | |
| 327 | Humoral Immune Response, Lymphoid Tissue Structure and Development | formation of germinal | 3.56E−04 |
| | | center | |
| 328 | Connective Tissue Development and Function, Tissue Morphology | quantity of connective | 3.57E−04 |
| | | tissue cells | |
| 329 | Cellular Movement | migration of cells | 3.70E−04 |
| 330 | Auditory Disease, Inflammatory Disease | chronic otitis media | 3.76E−04 |
| 331 | Cancer, Organismal Injury and Abnormalities, Respiratory Disease | stage 4 EGFR expressing | 3.76E−04 |
| | | non-small cell lung cancer | |
| 332 | Behavior | motor learning | 3.76E−04 |
| 333 | Neurological Disease, Psychological Disorders | disorder of basal ganglia | 3.82E−04 |
| 334 | Nervous System Development and Function, Organ Morphology, Organismal | morphology of cerebral | 4.16E−04 |
| | Development | cortex | |
| 335 | Cell Death and Survival | cellular degradation | 4.17E−04 |
| 336 | Inflammatory Response | graft rejection | 4.24E−04 |
| 337 | Cardiovascular System Development and Function, Organ Morphology, | morphology of trabeculae | 4.24E−04 |
| | Organismal Development | carne | |
| 338 | Psychological Disorders | panic disorder | 4.24E−04 |
| 339 | Cellular Development, Cellular Growth and Proliferation, Embryonic | formation of brain cells | 4.27E−04 |
| | Development, Nervous System Development and Function, Organ Development, | | |
| | Organismal Development, Tissue Development | | |
| 340 | Cancer, Gastrointestinal Disease, Organismal Injury and Abnormalities | small intestine cancer | 4.27E−04 |
| 341 | Embryonic Development, Nervous System Development and Function, Organ | formation of | 4.30E−04 |
| | Development, Organismal Development, Tissue Development | telencephalon | |
| 342 | Energy Production, Lipid Metabolism, Small Molecule Biochemistry | oxidation of fatty acid | 4.49E−04 |
| 343 | Auditory Disease, Neurological Disease | noise-induced hearing loss | 4.49E−04 |
| 344 | Cancer, Organismal Injury and Abnormalities, Respiratory Disease | stage 3B EGFR mutation | 4.49E−04 |
| | | positive non-small cell | |
| | | lung cancer | |
| 345 | Cardiovascular Disease, Neurological Disease | disruption of blood-brain | 4.49E−04 |
| | | barrier | |
| 346 | Developmental Disorder, Hereditary Disorder, Metabolic Disease, Organismal | lipofuscinosis | 4.49E−04 |
| | Injury and Abnormalities | | |
| 347 | Neurological Disease, Psychological Disorders | primary insomnia | 4.49E−04 |
| 348 | Cancer, Organismal Injury and Abnormalities | stage 3A cancer | 4.49E−04 |
| 349 | Neurological Disease | early-onset neurological | 4.61E−04 |
| | | disorder | |
| 350 | Lipid Metabolism, Molecular Transport, Small Molecule Biochemistry | secretion of lipid | 4.74E−04 |
| 351 | Psychological Disorders | Anxiety Disorders | 5.03E−04 |
| 352 | Behavior | anxiety-like behavior | 5.08E−04 |
| 353 | Embryonic Development, Organ Development, Organ Morphology, Organismal | abnormal morphology of | 5.12E−04 |
| | Development, Respiratory System Development and Function, Tissue | lung | |
| | Development | | |
| 354 | Cell Signaling, Cellular Function and Maintenance, Small Molecule Biochemistry, | homeostasis of Ca2+ | 5.16E−04 |
| | Vitamin and Mineral Metabolism | | |
| 355 | Cell Death and Survival | cell death of progenitor | 5.32E−04 |
| | | cells | |
| 356 | Neurological Disease | myoclonic seizure | 5.32E−04 |
| 357 | Developmental Disorder, Hereditary Disorder, Neurological Disease, Organismal | nonsyndromic familial | 5.32E−04 |
| | Injury and Abnormalities | mental retardation | |
| 358 | Skeletal and Muscular System Development and Function | abnormal morphology of | 5.36E−04 |
| | | muscle | |
| 359 | Organismal Development | abnormal morphology of | 5.46E−04 |
| | | abdomen | |
| 360 | Neurological Disease | late-onset neurological | 5.53E−04 |
| | | disorder | |
| 361 | Cellular Movement, Nervous System Development and Function | guidance of axons | 5.64E−04 |
| 362 | Organismal Injury and Abnormalities | stenosis | 5.64E−04 |
| 363 | Organismal Injury and Abnormalities, Renal and Urological Disease | chronic kidney disease | 5.99E−04 |
| 364 | Psychological Disorders | impulse control disorder | 6.02E−04 |
| 365 | Embryonic Development, Nervous System Development and Function, Organ | abnormal morphology of | 6.08E−04 |
| | Development, Organ Morphology, Organismal Development, Tissue Development, | neurosensory retina | |
| | Visual System Development and Function | | |
| 366 | Neurological Disease, Psychological Disorders | daytime sleepiness | 6.10E−04 |
| 367 | Lipid Metabolism, Molecular Transport, Small Molecule Biochemistry | release of oleic acid | 6.10E−04 |
| 368 | Neurological Disease | Neurodegeneration | 6.18E−04 |
| 369 | Cardiovascular System Development and Function, Organ Morphology, | morphology of heart | 6.21E−04 |
| | Organismal Development | | |
| 370 | Behavior | anxiety | 6.26E−04 |
| 371 | Cellular Function and Maintenance | turnover of cells | 6.26E−04 |
| 372 | Metabolic Disease, Neurological Disease, Psychological Disorders | Alzheimer's disease | 6.28E−04 |
| 373 | Neurological Disease, Psychological Disorders | Dementia | 6.29E−04 |
| 374 | Cell Death and Survival, Cellular Compromise, Neurological Disease, Tissue | degeneration of neurons | 6.38E−04 |
| | Morphology | | |
| 375 | Cancer, Organismal Injury and Abnormalities, Renal and Urological Disease | renal cell cancer | 6.45E−04 |
| 376 | Organismal Injury and Abnormalities | postoperative pain | 6.49E−04 |
| 377 | Gastrointestinal Disease | vomiting | 6.49E−04 |
| 378 | Neurological Disease | damage of nervous system | 6.58E−04 |
| 379 | Lipid Metabolism, Molecular Transport, Small Molecule Biochemistry | clearance of lipid | 6.65E−04 |
| 380 | Cell-To-Cell Signaling and Interaction, Nervous System Development and | synaptic transmission of | 6.65E−04 |
| | Function | hippocampal cells | |
| 381 | Behavior | spatial learning | 6.76E−04 |
| 382 | Nervous System Development and Function, Organ Morphology, Organismal | abnormal morphology of | 7.03E−04 |
| | Development | cerebral cortex | |
| 383 | Neurological Disease, Psychological Disorders | attention deficit | 7.08E−04 |
| | | hyperactivity disorder | |
| 384 | Hereditary Disorder, Ophthalmic Disease, Organismal Injury and Abnormalities | Hereditary Eye Disease | 7.20E−04 |
| 385 | Cellular Development, Cellular Growth and Proliferation, Embryonic | development of cerebral | 7.30E−04 |
| | Development, Nervous System Development and Function, Organ Development, | cortex cells | |
| | Organismal Development, Tissue Development | | |
| 386 | Cell Morphology, Cellular Assembly and Organization, Cellular Function and | formation of cilia | 7.30E−04 |
| | Maintenance | | |
| 387 | Developmental Disorder, Endocrine System Disorders, Organismal Injury and | cryptorchidism | 7.38E−04 |
| | Abnormalities, Reproductive System Disease | | |
| 388 | Cellular Movement, Hair and Skin Development and Function | migration of epithelial cell | 7.40E−04 |
| | | lines | |
| 389 | Nervous System Development and Function, Organ Morphology, Organismal | abnormal morphology of | 7.58E−04 |
| | Development | visual cortex | |
| 390 | Cell Death and Survival, Cellular Function and Maintenance | clearance of Salmonella | 7.58E−04 |
| | | enterica subsp. enterica | |
| | | serovar Dublin strain | |
| | | SL5631 | |
| 391 | Cancer, Cellular Development, Cellular Growth and Proliferation, Organismal | colony formation of | 7.58E−04 |
| | Injury and Abnormalities, Tumor Morphology | leukemia stem cells | |
| 392 | Cell Cycle, Cell-To-Cell Signaling and Interaction, Hematological System | effector phase of naive T | 7.58E−04 |
| | Development and Function, Inflammatory Response | lymphocytes | |
| 393 | Cell Cycle, Respiratory System Development and Function | entry into S phase of lung | 7.58E−04 |
| | | cell lines | |
| 394 | Cancer, Gastrointestinal Disease, Organismal Injury and Abnormalities | gastrointestinal stromal | 7.58E−04 |
| | | tumor in gastrointestinal | |
| | | tract | |
| 395 | Cancer, Cellular Movement, Organismal Injury and Abnormalities | invasion of hepatocytes | 7.58E−04 |
| 396 | Neurological Disease | misrouting of axons | 7.58E−04 |
| 397 | Neurological Disease, Organismal Injury and Abnormalities | neurodegeneration of | 7.58E−04 |
| | | spinal cord | |
| 398 | Energy Production, Lipid Metabolism, Small Molecule Biochemistry | oxidation of lauric acid | 7.58E−04 |
| 399 | Connective Tissue Disorders | pseudoxanthoma | 7.58E−04 |
| | | elasticum | |
| 400 | Cellular Function and Maintenance | regulation of chondrocytes | 7.58E−04 |
| 401 | Cardiovascular System Development and Function, Organ Morphology, | abnormal morphology of | 7.59E−04 |
| | Organismal Development | heart | |
| 402 | Nervous System Development and Function | morphology of nerves | 7.87E−04 |
| 403 | Organismal Injury and Abnormalities | formation of pathological | 7.88E−04 |
| | | cyst | |
| 404 | Cell Signaling | enzyme linked receptor | 7.88E−04 |
| | | protein signaling pathway | |
| 405 | Nervous System Development and Function, Organ Morphology, Organismal | abnormal morphology of | 8.01E−04 |
| | Development | forebrain | |
| 406 | Cardiovascular System Development and Function, Cell-To-Cell Signaling and | action potential of | 8.04E−04 |
| | Interaction, Nervous System Development and Function, Skeletal and Muscular | cardiomyocytes | |
| | System Development and Function | | |
| 407 | Ophthalmic Disease, Organismal Injury and Abnormalities | age-related macular | 8.17E−04 |
| | | degeneration | |
| 408 | Neurological Disease, Organismal Injury and Abnormalities | brain atrophy | 8.28E−04 |
| 409 | Cellular Development, Cellular Growth and Proliferation | proliferation of | 8.28E−04 |
| | | lymphoblastoid cell lines | |
| 410 | Organismal Injury and Abnormalities | Bleeding | 8.29E−04 |
| 411 | Cardiovascular System Development and Function, Organ Morphology, | morphology of cardiac | 8.30E−04 |
| | Organismal Development, Skeletal and Muscular System Development and | muscle | |
| | Function | | |
| 412 | Neurological Disease, Psychological Disorders, Skeletal and Muscular Disorders | Parkinson's disease | 8.87E−04 |
| 413 | Cancer, Organismal Injury and Abnormalities, Reproductive System Disease | prostatic carcinoma | 9.00E−04 |
| 414 | Cardiovascular System Development and Function, Organ Morphology, | morphology of heart | 9.15E−04 |
| | Organismal Development | ventricle | |
| 415 | Neurological Disease | epileptic encephalopathy | 9.50E−04 |
| 416 | Tissue Morphology | abnormal morphology of | 9.58E−04 |
| | | epithelial tissue | |
| 417 | Nervous System Development and Function | abnormal morphology of | 9.75E−04 |
| | | vestibulocochlear nerve | |
| 418 | Neurological Disease | unconsciousness | 9.75E−04 |
| 419 | Lipid Metabolism, Small Molecule Biochemistry | homeostasis of lipid | 9.85E−04 |
| 420 | Cardiovascular System Development and Function | morphology of vessel | 9.91E−04 |
| 421 | Cellular Development, Cellular Growth and Proliferation, Hematological System | proliferation of regulatory | 9.95E−04 |
| | Development and Function | T lymphocytes | |
| 422 | Neurological Disease | chorea | 1.01E−03 |
| 423 | Cellular Compromise, Cellular Function and Maintenance | endoplasmic reticulum | 1.01E−03 |
| | | stress response of cells | |
| 424 | Lipid Metabolism, Small Molecule Biochemistry, Vitamin and Mineral Metabolism | homeostasis of cholesterol | 1.01E−03 |
| 425 | Cell-To-Cell Signaling and Interaction | adhesion of connective | 1.02E−03 |
| | | tissue cells | |
| 426 | Nervous System Development and Function, Organ Morphology, Organismal | abnormal morphology of | 1.03E−03 |
| | Development | cerebellar vermis | |
| 427 | Behavior | hyperlocomotion | 1.03E−03 |
| 428 | Cellular Movement, Immune Cell Trafficking, Inflammatory Response | invasion of macrophages | 1.03E−03 |
| 429 | Auditory Disease, Neurological Disease | late-onset hearing loss | 1.03E−03 |
| 430 | Energy Production, Lipid Metabolism, Small Molecule Biochemistry | oxidation of | 1.03E−03 |
| | | polyunsaturated fatty | |
| | | acids | |
| 431 | Cellular Development, Cellular Growth and Proliferation, Embryonic | tubulogenesis of kidney | 1.03E−03 |
| | Development, Organ Development, Organismal Development, Renal and | cell lines | |
| | Urological System Development and Function, Tissue Development | | |
| 432 | Respiratory System Development and Function | abnormal morphology of | 1.05E−03 |
| | | respiratory system | |
| 433 | Cancer, Organismal Injury and Abnormalities | glandular intraepithelial | 1.05E−03 |
| | | neoplasm | |
| 434 | Neurological Disease, Organismal Injury and Abnormalities, Psychological | traumatic brain injury | 1.08E−03 |
| | Disorders | | |
| 435 | Cancer, Neurological Disease, Organismal Injury and Abnormalities | astrocytoma | 1.10E−03 |
| 436 | Digestive System Development and Function | abnormal morphology of | 1.11E−03 |
| | | digestive system | |
| 437 | Cell-To-Cell Signaling and Interaction, Hematological System Development and | cell-cell adhesion of | 1.12E−03 |
| | Function, Immune Cell Trafficking | leukocytes | |
| 438 | Hereditary Disorder, Neurological Disease, Organismal Injury and Abnormalities | severe myoclonic epilepsy | 1.12E−03 |
| | | in infancy | |
| 439 | Cancer, Neurological Disease, Organismal Injury and Abnormalities | central nervous system | 1.13E−03 |
| | | cancer | |
| 440 | Cell Signaling, Post-Translational Modification | activation of Protein | 1.14E−03 |
| | | kinase | |
| 441 | Cardiovascular Disease, Neurological Disease | stroke | 1.19E−03 |
| 442 | Cell Morphology | sprouting | 1.19E−03 |
| 443 | Organismal Injury and Abnormalities, Skeletal and Muscular Disorders | pain of muscle | 1.20E−03 |
| 444 | Developmental Disorder, Neurological Disease, Psychological Disorders | speech and language | 1.20E−03 |
| | | disorders | |
| 445 | Neurological Disease | acute encephalopathy | 1.20E−03 |
| 446 | Cancer, Organismal Injury and Abnormalities, Renal and Urological Disease | renal cancer | 1.26E−03 |
| 447 | Hematological System Development and Function, Tissue Morphology | quantity of myeloid cells | 1.26E−03 |
| 448 | Cellular Growth and Proliferation | proliferation of cells | 1.27E−03 |
| 449 | Organismal Injury and Abnormalities | fatigue | 1.28E−03 |
| 450 | Cell-To-Cell Signaling and Interaction, Nervous System Development and | GABA-mediated receptor | 1.30E−03 |
| | Function | currents | |
| 451 | Lipid Metabolism, Nucleic Acid Metabolism, Small Molecule Biochemistry | conversion of acyl- | 1.30E−03 |
| | | coenzyme A | |
| 452 | Cell Death and Survival, Cellular Compromise | cytotoxicity of phagocytes | 1.30E−03 |
| 453 | Connective Tissue Disorders, Organismal Injury and Abnormalities, Skeletal and | fracture of bone | 1.31E−03 |
| | Muscular Disorders, Tissue Morphology | | |
| 454 | Psychological Disorders | hyperactive behavior | 1.34E−03 |
| 455 | Cardiovascular System Development and Function, Tissue Development | development of | 1.35E−03 |
| | | cardiovascular tissue | |
| 456 | Organismal Injury and Abnormalities | abnormality of head | 1.37E−03 |
| 457 | Cardiovascular System Development and Function, Embryonic Development, | cardiogenesis | 1.38E−03 |
| | Organ Development, Organismal Development, Tissue Development | | |
| 458 | Hematological Disease, Immunological Disease | chronic | 1.38E−03 |
| | | lymphoproliferative | |
| | | disease | |
| 459 | Cancer, Organismal Injury and Abnormalities, Reproductive System Disease | prostatic adenocarcinoma | 1.40E−03 |
| 460 | Cellular Movement | invasion of brain cancer | 1.43E−03 |
| | | cell lines | |
| 461 | Neurological Disease, Psychological Disorders | bipolar I disorder | 1.43E−03 |
| 462 | Connective Tissue Disorders, Organismal Injury and Abnormalities, Skeletal and | hip fracture | 1.44E−03 |
| | Muscular Disorders, Tissue Morphology | | |
| 463 | Cellular Function and Maintenance | maintenance of leukocytes | 1.44E−03 |
| 464 | Cellular Assembly and Organization | quantity of cellular | 1.44E−03 |
| | | inclusion bodies | |
| 465 | Skeletal and Muscular Disorders | skelatal muscle spasticity | 1.44E−03 |
| 466 | Cell-To-Cell Signaling and Interaction, Nervous System Development and | synaptic transmission of | 1.45E−03 |
| | Function | nervous tissue | |
| 467 | Cancer, Neurological Disease, Organismal Injury and Abnormalities | gliomatosis | 1.49E−03 |
| 468 | Cancer, Organismal Injury and Abnormalities, Respiratory Disease | EGFR exon 19 deletion | 1.50E−03 |
| | | positive EGFR L858R | |
| | | mutation positive mixed | |
| | | cell non-small cell lung | |
| | | carcinoma | |
| 469 | Cancer, Organismal Injury and Abnormalities, Respiratory Disease | EGFR(L858R) positive | 1.50E−03 |
| | | metastatic non-small cell | |
| | | lung cancer | |
| 470 | Cancer, Organismal Injury and Abnormalities, Respiratory Disease | HER2 mutation positive | 1.50E−03 |
| | | non-small cell lung cancer | |
| 471 | Auditory Disease, Cellular Compromise, Organismal Injury and Abnormalities, | degeneration of pillar cells | 1.50E−03 |
| | Tissue Morphology | | |
| 472 | Cell-To-Cell Signaling and Interaction, Nervous System Development and | depotentiation of synapse | 1.50E−03 |
| | Function | | |
| 473 | Neurological Disease, Psychological Disorders | drowsiness | 1.50E−03 |
| 474 | Drug Metabolism, Molecular Transport | efflux of mitoxantrone | 1.50E−03 |
| 475 | Cellular Movement | invasion of pneumocytes | 1.50E−03 |
| 476 | Cancer, Organismal Injury and Abnormalities | locally advanced head and | 1.50E−03 |
| | | neck squamous cell | |
| | | carcinoma | |
| 477 | Carbohydrate Metabolism, Lipid Metabolism, Small Molecule Biochemistry | metabolism of | 1.50E−03 |
| | | erythromycin | |
| 478 | Drug Metabolism, Endocrine System Development and Function, Lipid | metabolism of | 1.50E−03 |
| | Metabolism, Small Molecule Biochemistry, Vitamin and Mineral Metabolism | testosterone | |
| 479 | Cancer, Organismal Injury and Abnormalities, Respiratory Disease | metastatic EGFR (L858R) | 1.50E−03 |
| | | positive lung | |
| | | adenocarcinoma | |
| 480 | Cancer, Organismal Injury and Abnormalities | metastatic EGFR G719X | 1.50E−03 |
| | | mutation positive large | |
| | | cell carcinoma | |
| 481 | Cancer, Organismal Injury and Abnormalities, Respiratory Disease | metastatic EGFR G719X | 1.50E−03 |
| | | mutation positive lung | |
| | | adenocarcinoma | |
| 482 | Cancer, Organismal Injury and Abnormalities, Respiratory Disease | metastatic EGFR G719X | 1.50E−03 |
| | | mutation positive non- | |
| | | small cell lung cancer | |
| 483 | Cancer, Organismal Injury and Abnormalities, Respiratory Disease | metastatic EGFR G719X | 1.50E−03 |
| | | mutation positive | |
| | | squamous cell lung | |
| | | carcinoma | |
| 484 | Cancer, Organismal Injury and Abnormalities | metastatic EGFR L858R | 1.50E−03 |
| | | mutation positive large | |
| | | cell carcinoma | |
| 485 | Cancer, Organismal Injury and Abnormalities, Respiratory Disease | metastatic EGFR L858R | 1.50E−03 |
| | | mutation positive | |
| | | squamous cell lung | |
| | | carcinoma | |
| 486 | Cancer, Organismal Injury and Abnormalities | metastatic EGFR L861X | 1.50E−03 |
| | | mutation positive large | |
| | | cell carcinoma | |
| 487 | Cancer, Organismal Injury and Abnormalities, Respiratory Disease | metastatic EGFR L861X | 1.50E−03 |
| | | mutation positive lung | |
| | | adenocarcinoma | |
| 488 | Cancer, Organismal Injury and Abnormalities, Respiratory Disease | metastatic EGFR L861X | 1.50E−03 |
| | | mutation positive non- | |
| | | small cell lung cancer | |
| 489 | Cancer, Organismal Injury and Abnormalities, Respiratory Disease | metastatic EGFR L861X | 1.50E−03 |
| | | mutation positive | |
| | | squamous cell lung | |
| | | carcinoma | |
| 490 | Cancer, Organismal Injury and Abnormalities | metastatic EGFR S768I | 1.50E−03 |
| | | mutation positive large | |
| | | cell carcinoma | |
| 491 | Cancer, Organismal Injury and Abnormalities, Respiratory Disease | metastatic EGFR S768I | 1.50E−03 |
| | | mutation positive lung | |
| | | adenocarcinoma | |
| 492 | Cancer, Organismal Injury and Abnormalities, Respiratory Disease | metastatic EGFR S768I | 1.50E−03 |
| | | mutation positive non- | |
| | | small cell lung cancer | |
| 493 | Cancer, Organismal Injury and Abnormalities, Respiratory Disease | metastatic EGFR S768I | 1.50E−03 |
| | | mutation positive | |
| | | squamous cell lung | |
| | | carcinoma | |
| 494 | Cancer, Organismal Injury and Abnormalities | metastatic EGFR exon 19 | 1.50E−03 |
| | | deletion positive large cell | |
| | | carcinoma | |
| 495 | Cancer, Organismal Injury and Abnormalities, Respiratory Disease | metastatic EGFR exon 19 | 1.50E−03 |
| | | deletion positive lung | |
| | | adenocarcinoma | |
| 496 | Cancer, Organismal Injury and Abnormalities, Respiratory Disease | metastatic EGFR exon 19 | 1.50E−03 |
| | | deletion positive | |
| | | squamous cell lung | |
| | | carcinoma | |
| 497 | Cancer, Organismal Injury and Abnormalities, Respiratory Disease | metastatic EGFR | 1.50E−03 |
| | | sensitizing mutation | |
| | | positive large cell lung | |
| | | carcinoma | |
| 498 | Cancer, Organismal Injury and Abnormalities, Respiratory Disease | metastatic progressive | 1.50E−03 |
| | | EGFR activating | |
| | | mutation positive non- | |
| | | squamous non-small cell | |
| | | lung carcinoma | |
| 499 | Cancer, Organismal Injury and Abnormalities, Respiratory Disease | metastatic progressive | 1.50E−03 |
| | | EGFR sensitizing | |
| | | mutation positive non- | |
| | | small cell lung cancer | |
| 500 | Cancer, Organismal Injury and Abnormalities, Respiratory Disease | metastatic recurrent | 1.50E−03 |
| | | laryngeal squamous cell | |
| | | carcinoma | |
| 501 | Cancer, Organismal Injury and Abnormalities, Respiratory Disease | progressive EGFR | 1.50E−03 |
| | | (L858R) positive lung | |
| | | adenocarcinoma | |
| 502 | Cancer, Organismal Injury and Abnormalities | progressive EGFR G719X | 1.50E−03 |
| | | mutation positive large | |
| | | cell carcinoma | |

The top list from Table 4 is specified in more details.
^{A}shows in category details the diseases, abnormalities, developmental roles and other function of the human genes that are targeted by the human CRISPRs;
^{B}shows the specific disease and function annotations;
^{C}shows the significance of the IPA analyses;
column ^{D} which shows the genes involved can be found in List3 hereinbelow.
© 2000-2016 QIAGEN. All rights reserved.

[0062] Next to that, IPA upstream analyses also established that the gene targets could be effected in expression by a wide variety of chemicals including pharmaceutical compounds (Table 5).

TABLE 5
List of upstream regulators that effect the expression human CRISPR gene targets.

| ©2000-2016 QIAGEN. All rights | | | |
|---|---|---|---|
| reserved. | | | |
| Upstream Regulator^{A} | Molecule Type^{B} | p-value of overlap^{C} | |
| STAT6 | transcription | 2.63E−06 | [symbol] COS IL15 MMP2 NCOA3 PPARGC1A |
| | regulator | | [symbol] VCAM1 |
| topotecan | chemical drug | 3.64E−06 | [symbol] RB1 GRID1 GRID2 GRIK2 GRM5 |
| nandrolone decanoate | chemical drug | 1.27E−05 | |
| testosterone cypionate | chemical drug | 1.27E−05 | |
| cyclosporin A | biologic drug | 2.97E−05 | [symbol] COS IQGAP2 ITPR2 LBR MMP2 NFKB1 |
| | | | [symbol] FSF11 UTRN VCAM1 |
| methyltestosterone | chemical drug | 3.13E−05 | |
| CFTR | ion channel | 3.17E−05 | [symbol] D17B4 NFKB1 OSBPL1A |
| PPARA | ligand-dependent | 5.09E−05 | [symbol] CFH CYBB CYP1A1 HMGCR HSD17B4 |
| | nuclear receptor | | [symbol] SARDH SC5D VCAM1 |
| HNRNPA2B1 | other | 5.20E−05 | [symbol] AST4 NPR3 PLOD2 PPARGC1A UTRN |
| lipopolysaccharide | chemical drug | 5.28E−05 | [symbol] D22 CD28 CD2AP CDH2 CRHR1 CTSB |
| | | | [symbol] DDIT4 EGR2 EMB EPHX2 FEM1C |
| | | | [symbol] L1RAPIT1 ITGA8 ITGAM ITGAX LIPG |
| | | | [symbol] PPARGC1A RNF19A SOD1 TEK TFEC |
| EGR1 | transcription | 5.36E−05 | [symbol] HPGD ITGAM NFKB1 SOD1 TNFSF11 |
| | regulator | | |
| SSPN | other | 6.20E−05 | |
| Pkc(s) | group | 6.75E−05 | [symbol] EGR2 HMGCR HPGD MMP2 NFKB1 |
| ethanol | chemical- | 9.61E−05 | [symbol] 3 CYP3A5 EPHX1 GABRG2 GPC5 IL15 |
| | endogenous | | [symbol] SF11 VCAM1 |
| | mammalian | | |
| AGT | growth factor | 1.04E−04 | [symbol] CYBB CYP19A1 FOXP2 GABRB3 HMGCR |
| | | | [symbol] LN2 TNFSF11 VCAM1 |
| CREB1 | transcription | 1.38E−04 | [symbol] EGR2 ESRRG GRIK2 GRM5 HMGCR |
| | regulator | | [symbol] C1A SQSTM1 THOP1 TNFSF11 XKR4 |
| hydroxypropyl-beta-cyclodextrin | chemical drug | 1.53E−04 | |
| prednisolone | chemical drug | 1.61E−04 | [symbol] FKB1 NMT2 SOD1 SQSTM1 TNFSF11 |
| NFATC1 | transcription | 1.69E−04 | [symbol] 1 UTRN VCAM1 |
| | regulator | | |
| Alpha 1 antitrypsin | group | 2.18E−04 | |
| PXR ligand-PXR-Retinoic acid- | complex | 3.32E−04 | [symbol] 2 |
| RXRα | | | |
| TSPYL5 | other | 3.33E−04 | [symbol] 1 FUT8 |
| alprazolam | chemical drug | 3.56E−04 | |
| baicalein | chemical- | 4.65E−04 | |
| | endogenous non- | | |
| | mammalian | | |
| CLCN5 | ion channel | 4.84E−04 | |
| MMP7 | peptidase | 4.84E−04 | |
| ANXA7 | ion channel | 5.48E−04 | |
| dimethyl sulfoxide | chemical drug | 6.15E−04 | [symbol] SQSTM1 TNFSF11 VCAM1 |
| Il8r | group | 6.38E−04 | |
| tetrathiomolybdate | chemical drug | 6.38E−04 | |
| methoxyacetic acid | chemical toxicant | 6.48E−04 | |
| CXCL8 | cytokine | 6.89E−04 | [symbol] 2 VCAM1 |
| ESR1 | ligand-dependent | 7.26E−04 | [symbol] ENPK CLN3 CTSB CYP19A1 CYP1A1 |
| | nuclear receptor | | [symbol] OSR1 HMGCR HSD17B4 HYAL1 KLF3- |
| | | | [symbol] D2 PPARGC1A ROBO2 RTP4 SQSTM1 |
| mono-(2-ethylhexyl)phthalate | chemical toxicant | 7.77E−04 | [symbol] 1 PPARGC1A SC5D SOD1 SUCLG2 |
| LDL | complex | 7.98E−04 | [symbol] YOU1 ITPR2 MMP2 NFKB1 OSCAR |
| miR-19b-3p (and other miRNAs | mature microrna | 8.21E−04 | |
| w/seed GUGCAAA) | | | |
| dopamine | chemical- | 8.57E−04 | [symbol] 4 NPR3 SLC6A3 |
| | endogenous | | |
| | mammalian | | |
| pirinixic acid | chemical toxicant | 8.71E−04 | [symbol] A2 CDH2 CFH CTSB CYP1A1 CYP3A5 |
| | | | [symbol] SC5D VCAM1 |
| eplerenone | chemical drug | 9.50E−04 | |
| TICAM1 | other | 1.01E−03 | [symbol] FSF11 TSC22D1 VCAM1 |
| MYD88 | other | 1.01E−03 | [symbol] KB1 SLCO3A1 TFEC TNFSF11 TSC22D1 |
| YWHAG | other | 1.03E−03 | |
| cholesterol | chemical- | 1.04E−03 | [symbol] M ITGAX MMP2 SC5D VCAM1 ZFPM2 |
| | endogenous | | |
| | mammalian | | |
| SETDB1 | enzyme | 1.08E−03 | |
| PRKAA2 | kinase | 1.19E−03 | [symbol] 2 DOCK4 PPARGC1A |
| PURA | transcription | 1.28E−03 | |
| | regulator | | |
| CDH3 | other | 1.28E−03 | |
| bitertanol | chemical drug | 1.28E−03 | |
| HDAC10 | transcription | 1.28E−03 | |
| | regulator | | |
| GABRA1 | ion channel | 1.28E−03 | |
| (−)-isoproterenol | chemical drug | 1.28E−03 | |
| methyl cellosolve | chemical reagent | 1.28E−03 | |
| nitrendipine | chemical drug | 1.28E−03 | |
| elcatonin | biologic drug | 1.28E−03 | |
| dexamethasone | chemical drug | 1.30E−03 | [symbol] C12orf42 CPA4 CRHR1 CTSB CYBB |
| | | | [symbol] 2 FOXN3 GABRB1 GLRA2 IL15 ITGAM |
| | | | [symbol] 2 OSBPL1A PLOD2 PPARGC1A |
| | | | [symbol] SMOC2 SOD1 SYK TNFSF11 TSC22D1 |
| CLEC11A | growth factor | 1.30E−03 | |
| IL4 | cytokine | 1.36E−03 | [symbol] HPGD ICOS IL15 ITGAX LIPG MERTK |
| | | | [symbol] C1A PROS1 SQSTM1 SYK TFEC THOP1 |
| Foxp1 | transcription | 1.37E−03 | |
| | regulator | | |
| 15-deoxy-delta-12 14-PGJ 2 | chemical- | 1.49E−03 | [symbol] NFKB1 SOD1 TNFSF11 VCAM1 |
| | endogenous non- | | |
| | mammalian | | |
| rosiglitazone | chemical drug | 1.52E−03 | [symbol] A1 DLD EPHX2 GYS2 HPGD ITGAM |
| | | | [symbol] TR1 |
| ZBED6 | other | 1.53E−03 | |
| Rhox5 | transcription | 1.56E−03 | |
| | regulator | | |
| Creb | group | 1.58E−03 | [symbol] GABRG2 HPGD ITGAM MMP2 PPARGC1A |
| MET | kinase | 1.85E−03 | [symbol] SC22D1 |
| TCF | group | 1.85E−03 | [symbol] P2 TSC22D1 |
| ZC3H14 | other | 1.87E−03 | |
| PLAUR | transmembrane | 1.90E−03 | |
| | receptor | | |
| APOE | transporter | 2.07E−03 | [symbol] ITGAX LIPG MMP2 SOD1 VCAM1 |
| minocycline | chemical drug | 2.07E−03 | |
| ACOT13 | enzyme | 2.12E−03 | |
| UBQLN1 | other | 2.12E−03 | |
| UTRN | transmembrane | 2.12E−03 | |
| | receptor | | |
| miR-125b-5p (and other miRNAs | mature microrna | 2.20E−03 | [symbol] UVRAG |
| w/seed CCCUGAG) | | | |
| STK4 | kinase | 2.22E−03 | |
| IL10RA | transmembrane | 2.26E−03 | [symbol] 5 DDIT4 GSTM2 HMCN1 HPGD |
| | receptor | | |
| decitabine | chemical drug | 2.27E−03 | [symbol] R2 CASP8 CDH13 CDH2 CYP19A1 |
| | | | [symbol] RTP4 SYK |
| genistein | chemical drug | 2.31E−03 | [symbol] 1 CYP1A1 HMGCR HPGD MMP2 PPT1 |
| MAPK8 | kinase | 2.40E−03 | [symbol] CYP1A1 MMP2 PPARGC1A |
| Akt | group | 2.42E−03 | [symbol] FKB1 PPARGC1A SEMA6D UTRN |
| PRKAA1 | kinase | 2.46E−03 | [symbol] K4 PPARGC1A |
| TNF | cytokine | 2.50E−03 | [symbol] DH2 CRHR1 CTSB CXCL13 CYBB |
| | | | [symbol] A2 GABRG2 GSTM2 GTDC1 HIVEP1 |
| | | | [symbol] R2 KRT6B MMP2 NFKB1 PDPN PLOD2 |
| | | | [symbol] K TNFSF11 TPST1 VAV3 VCAM1 |
| FOS | transcription | 2.50E−03 | [symbol] 2 GRIK2 HPGD MMP2 PDPN PTPN12 |
| | regulator | | XYLT1 |
| dihydrotestosterone | chemical- | 2.55E−03 | [symbol] CYP19A1 FOXP2 GOSR1 HMGCR HPGD |
| | endogenous | | [symbol] S1 SLCO3A1 VCAM1 |
| | mammalian | | |
| GNAS | enzyme | 2.57E−03 | |
| TNFRSF1A | transmembrane | 2.74E−03 | [symbol] IMP2 VCAM1 |
| | receptor | | |
| ADCYAP1 | other | 2.74E−03 | [symbol] GAM LMO1 NPR3 TENM2 TSC22D1 |
| OLR1 | transmembrane | 2.82E−03 | |
| | receptor | | |
| metribolone | chemical reagent | 2.85E−03 | [symbol] P2 PDE4D PROS1 TRIM36 TSC22D1 |
| ESRRA | ligand-dependent | 2.89E−03 | [symbol] ARGC1A PPP2R2B |
| | nuclear receptor | | |
| LY294002 | chemical-kinase | 3.01E−03 | [symbol] CUBN CYP19A1 DHRS2 EGR2 ERBB3 |
| | inhibitor | | VCAM1 |
| emodin | chemical drug | 3.09E−03 | |
| GRK5 | kinase | 3.14E−03 | |
| CXCL5 | cytokine | 3.14E−03 | |
| FES | kinase | 3.14E−03 | |
| LRIG1 | other | 3.14E−03 | |
| phenelzine | chemical drug | 3.14E−03 | |
| bergamottin | chemical- | 3.14E−03 | |
| | endogenous non- | | |
| | mammalian | | |
| dieldrin | chemical toxicant | 3.14E−03 | |
| PD98059 | chemical-kinase | 3.26E−03 | [symbol] C5 HPGD HYOU1 ITGAM ITGAX LDHC |
| | inhibitor | | [symbol] VCAM1 |
| methotrexate | chemical drug | 3.28E−03 | [symbol] D17B4 MASP2 SOD1 TNFSF11 VCAM1 |
| HR | transcription | 3.38E−03 | |
| | regulator | | |
| BAPTA-AM | chemical reagent | 3.38E−03 | |
| tosylphenylalanyl chloromethyl | chemical-protease | 3.50E−03 | |
| ketone | inhibitor | | |
| Mapk | group | 3.54E−03 | [symbol] AM1 |
| H89 | chemical-kinase | 3.55E−03 | [symbol] 1A TNFSF11 VCAM1 |
| | inhibitor | | |
| TGFB1 | growth factor | 3.64E−03 | [symbol] 28 CDH2 CHRNA7 CTSB CYBB DDIT4 |
| | | | [symbol] D IL15 ITGAM ITGAX ITPR2 LBR MMP2 |
| | | | [symbol] 1 PLOD2 PPARGC1A PPT1 PTPN20 |
| | | | [symbol] AM1 XYLT1 ZFPM2 |
| GPX1 | enzyme | 3.68E−03 | |
| ARHGAP21 | other | 3.68E−03 | |
| U73122 | chemical reagent | 3.68E−03 | |
| caffeic acid phenethyl ester | chemical toxicant | 3.72E−03 | [symbol] VCAM1 |
| TP73 | transcription | 3.84E−03 | [symbol] INTEP1 ITGAX MMP2 PDPN PRKAG2 |
| | regulator | | |
| ritonavir | chemical drug | 3.85E−03 | [symbol] GCR SC5D VCAM1 |
| berberine | chemical drug | 3.91E−03 | [symbol] 2 VCAM1 |
| CEBPA | transcription | 3.92E−03 | [symbol] 2 EPHA7 EPHX1 HMGCR HPGD ITGAM |
| | regulator | | |
| RAC2 | enzyme | 4.00E−03 | |
| phorbol myristate acetate | chemical drug | 4.02E−03 | [symbol] CL13 CYBB CYP19A1 CYP1A1 DDIT4 |
| | | | [symbol] KLHL4 LIPG MAST4 MMP2 NFKB1 |
| | | | [symbol] AM1 |
| RNF41 | enzyme | 4.36E−03 | |
| PPP1CA | phosphatase | 4.36E−03 | |
| androstenedione | chemical- | 4.36E−03 | |
| | endogenous | | |
| | mammalian | | |
| Calcineurin A | group | 4.56E−03 | |
| CD86 | transmembrane | 5.08E−03 | |
| | receptor | | |
| cholic acid | chemical- | 5.09E−03 | [symbol] GC1A |
| | endogenous | | |
| | mammalian | | |
| IFI16 | transcription | 5.09E−03 | |
| | regulator | | |
| nifedipine | chemical drug | 5.09E−03 | [symbol] 1 |
| MTA3 | other | 5.15E−03 | |
| diosgenin | chemical- | 5.15E−03 | |
| | endogenous non- | | |
| | mammalian | | |
| TLR4 | transmembrane | 5.33E−03 | [symbol] RK2 MERTK NFKB1 SLCO3A1 TNFSF11 |
| | receptor | | |
| U0126 | chemical-kinase | 5.65E−03 | [symbol] 1 DDAH1 DHRS2 HPGD MMP2 PTPN12 |
| | inhibitor | | [symbol] R1 |
| lithium | chemical drug | 5.69E−03 | |
| 2-amino-5-azotoluene | chemical toxicant | 5.75E−03 | |
| ziprasidone | chemical drug | 5.75E−03 | |
| miR-200b-3p (and other miRNAs | mature microrna | 5.79E−03 | |
| w/seed AAUACUG) | | | |
| Cg | complex | 5.95E−03 | [symbol] EPHA7 HMGCR HPGD MMP2 NPR3 |
| PTEN | phosphatase | 5.99E−03 | [symbol] HMGCR LALBA MMP2 NFKB1 |
| bucladesine | chemical toxicant | 6.00E−03 | [symbol] HMGCR MMP2 NFKB1 PDEAD TNFSF11 |
| NR1H4 | ligand-dependent | 6.13E−03 | [symbol] P2 PPARGC1A SQSTM1 |
| | nuclear receptor | | |
| PELP1 | other | 6.34E−03 | |
| ciglitazone | chemical drug | 6.34E−03 | |
| P38 MAPK | group | 6.36E−03 | [symbol] ITGAM MMP2 NFKB1 PPARGC1A |
| TCF7L2 | transcription | 6.44E−03 | [symbol] KLHL4 LDLRAP1 NKAIN2 PPARGC1A |
| | regulator | | |
| NfkB1-RelA | complex | 6.47E−03 | |
| DICER1 | enzyme | 6.64E−03 | [symbol] OS1 PTPRN2 TEK |
| SNCA | enzyme | 6.68E−03 | |
| RORA | ligand-dependent | 7.07E−03 | [symbol] CR HPGD PPARGC1A UGGT2 |
| | nuclear receptor | | |
| platelet activating factor | chemical- | 7.28E−03 | |
| | endogenous | | |
| | mammalian | | |
| aflatoxin B1 | chemical- | 7.33E−03 | |
| | endogenous non- | | |
| | mammalian | | |
| voltage-gated calcium channel | complex | 7.33E−03 | |
| FFAR1 | g-protein coupled | 7.33E−03 | |
| | receptor | | |
| TPM3 | other | 7.33E−03 | |
| SIAH1 | enzyme | 7.33E−03 | |
| beta-estradiol | chemical- | 7.43E−03 | [symbol] 2 CRHR1 CTSB CUBN CXCL13 CYBB |
| | endogenous | | [symbol] 2 ERBB3 ERBB4 FOXN3 HMGCR HPGD |
| | mammalian | | [symbol] NCOA3 NPR3 PTPN12 RAPSN RTP4 |
| | | | [symbol] SF11 TRHDE TSC22D1 VAV3 VCAM1 |
| SCAP | other | 7.78E−03 | |
| PIM1 | kinase | 7.78E−03 | |
| CIDEC | other | 7.98E−03 | |
| WNT3A | cytokine | 8.13E−03 | [symbol] RAPSN TNFSF11 VCAM1 |
| RASSF1 | other | 8.18E−03 | |
| diethylnitrosamine | chemical toxicant | 8.18E−03 | [symbol] 1 |
| calcitriol | chemical drug | 8.24E−03 | [symbol] 1 ERBB3 HPGD HSD17B4 ITGAM ITGAX |
| NUPR1 | transcription | 8.65E−03 | [symbol] ARS2 LBR P3H1 PCTP PRELID2 RILPL2 |
| | regulator | | |
| amphetamine | chemical drug | 9.01E−03 | |
| miR-451a (and other miRNAs | mature microrna | 9.07E−03 | |
| w/seed AACCGUU) | | | |
| GBX2 | transcription | 9.07E−03 | |
| | regulator | | |
| TAPI-1 | chemical-protease | 9.07E−03 | |
| | inhibitor | | |
| E64d | chemical-protease | 9.07E−03 | |
| | inhibitor | | |
| salmonella minnesota R595 | chemical- | 9.30E−03 | [symbol] 1 VCAM1 |
| lipopolysaccharides | endogenous non- | | |
| | mammalian | | |
| CXCR4 | g-protein coupled | 9.43E−03 | |
| | receptor | | |
| IL32 | cytokine | 9.43E−03 | |
| lysophosphatidic acid | chemical-other | 9.45E−03 | |
| REST | transcription | 9.66E−03 | [symbol] KR4 |
| | regulator | | |
| Focal adhesion kinase | group | 9.68E−03 | |
| NPPB | other | 9.68E−03 | |
| proteasome inhibitor PSI | chemical-protease | 9.68E−03 | |
| | inhibitor | | |
| daunorubicin | chemical drug | 9.68E−03 | |
| DDIT3 | transcription | 1.00E−02 | |
| | regulator | | |
| delta-9-tetrahydrocannabinol | chemical drug | 1.00E−02 | |
| mifepristone | chemical drug | 1.01E−02 | [symbol] GR2 HPGD ITGAM KRT6B NCOA3 |
| paclitaxel | chemical drug | 1.03E−02 | [symbol] A5 DDAH1 DHRS2 PTPN12 TSC22D1 |
| ESR2 | ligand-dependent | 1.04E−02 | [symbol] 11 EMB HPGD HSD17B4 KRT6B MMP2 |
| | nuclear receptor | | |
| vorinostat | chemical drug | 1.06E−02 | [symbol] MP2 TEK |
| HSF2 | transcription | 1.06E−02 | |
| | regulator | | |
| Map3k7 | kinase | 1.06E−02 | |
| atorvastatin | chemical drug | 1.07E−02 | [symbol] D1 TNFSF11 VCAM1 |
| TAF4 | transcription | 1.08E−02 | [symbol] |
| | regulator | | |
| phorbol esters | chemical-other | 1.08E−02 | [symbol] 3 |
| DNA-methyltransferase | group | 1.10E−02 | |
| mCluR | group | 1.10E−02 | |
| Adaptor protein 2 | complex | 1.10E−02 | |
| PLA2G2D | enzyme | 1.10E−02 | |
| Collagen Alpha1 | group | 1.10E−02 | |
| NPPC | other | 1.10E−02 | |
| AFP | transporter | 1.10E−02 | |
| ITGA3 | other | 1.10E−02 | |
| meloxicam | chemical drug | 1.10E−02 | |
| puerarin | chemical drug | 1.10E−02 | |
| gentamicin | chemical drug | 1.11E−02 | [symbol] OU1 SQSTM1 SUOX TSC22D1 VCAM1 |
| trichostatin A | chemical drug | 1.13E−02 | [symbol] CYP1A1 CYP3A5 DHRS2 FUT8 HMGCR |
| | | | [symbol] N VCAM1 |
| 8-bromoguanosine 3′ 5′-cyclic | chemical-kinase | 1.16E−02 | |
| monophosphate | inhibitor | | |
| SCARB1 | transporter | 1.16E−02 | |
| 4-methylnitrosoamino-1-(3- | chemical toxicant | 1.16E−02 | |
| pyridinyl)-1-butanone | | | |
| Sn50 peptide | chemical toxicant | 1.20E−02 | |
| LEP | growth factor | 1.20E−02 | [symbol] HMGCR ITGAM MMP2 PPARGC1A SC5D |
| IL27 | cytokine | 1.20E−02 | [symbol] CAM1 |
| SP600125 | chemical-kinase | 1.22E−02 | [symbol] IL15 TNFSF11 VCAM1 |
| | inhibitor | | |
| CEBPD | transcription | 1.24E−02 | [symbol] SF11 |
| | regulator | | |
| Pro-inflammatory Cytokine | group | 1.27E−02 | |
| FOLR1 | transporter | 1.29E−02 | [symbol] 1 |
| betamethasone | chemical drug | 1.30E−02 | |
| ELK4 | transcription | 1.30E−02 | |
| | regulator | | |
| CLCA2 | ion channel | 1.30E−02 | |
| RALA | enzyme | 1.30E−02 | |
| clotrimazole | chemical drug | 1.30E−02 | |
| palmitic acid | chemical- | 1.31E−02 | [symbol] R2B SQSTM1 VCAM1 |
| | endogenous | | |
| | mammalian | | |
| F3 | transmembrane | 1.34E−02 | |
| | receptor | | |
| SP1 | transcription | 1.34E−02 | CYP19A1 HMGCR IL15 ITGAM ITGAX |
| | regulator | | |
| lenalidomide | chemical drug | 1.35E−02 | [symbol] 4 UTRN |
| DMD | other | 1.43E−02 | [symbol] 1R14C UTRN XK |
| cocaine | chemical drug | 1.43E−02 | [symbol] NFKB1 SLC6A3 |
| CD80 | transmembrane | 1.48E−02 | |
| | receptor | | |
| ricinoleic acid | chemical- | 1.48E−02 | |
| | endogenous non- | | |
| | mammalian | | |
| troleandomycin | chemical drug | 1.48E−02 | |
| nicotinamide-beta-riboside | chemical- | 1.48E−02 | |
| | endogenous | | |
| | mammalian | | |
| 3 7 12-trihydroxycoprostane | chemical- | 1.48E−02 | |
| | endogenous | | |
| | mammalian | | |
| beclomethasone dipropionate | chemical drug | 1.48E−02 | |
| mecarzole | chemical drug | 1.48E−02 | |
| etalocib | chemical drug | 1.48E−02 | |
| hexacosanoyl-coenzyme A | chemical- | 1.48E−02 | |
| | endogenous non- | | |
| | mammalian | | |
| Plc beta | group | 1.48E−02 | |
| ceramidase | group | 1.48E−02 | |
| Abl1/2 | group | 1.48E−02 | |
| artemether | chemical drug | 1.48E−02 | |
| diacyl lipopeptide | chemical-other | 1.48E−02 | |
| AMG-9810 | chemical reagent | 1.48E−02 | |
| levocetirizine | chemical drug | 1.48E−02 | |
| polyglactin 910 | chemical reagent | 1.48E−02 | |
| LRP4 | other | 1.48E−02 | |
| CDC42BPB | kinase | 1.48E−02 | |
| SGSM1 | other | 1.48E−02 | |
| KLHL17 | other | 1.48E−02 | |
| ACER1 | enzyme | 1.48E−02 | |
| harman | chemical- | 1.48E−02 | |
| | endogenous non- | | |
| | mammalian | | |
| DNAJC15 | other | 1.48E−02 | |
| SLC39A4 | transporter | 1.48E−02 | |
| S100A14 | other | 1.48E−02 | |
| SGMS | group | 1.48E−02 | |
| AZD1981 | chemical drug | 1.48E−02 | |
| PF-4523655 | biologic drug | 1.48E−02 | |
| GABRD | ion channel | 1.48E−02 | |
| AHRR | other | 1.48E−02 | |
| CXCR5 | g-protein coupled | 1.48E−02 | |
| | receptor | | |
| mir-584 | microrna | 1.48E−02 | |
| mir-219 | microrna | 1.48E−02 | |
| mir-654 | microrna | 1.48E−02 | |
| GW 6471 | chemical reagent | 1.48E−02 | |
| atacicept | biologic drug | 1.48E−02 | |
| SLC30A9 | transporter | 1.48E−02 | |
| ETF1 | translation | 1.48E−02 | |
| | regulator | | |
| NAPB | transporter | 1.48E−02 | |
| FSCN1 | other | 1.48E−02 | |
| RNF19A | enzyme | 1.48E−02 | |
| SPOCK1 | other | 1.48E−02 | |
| DLGAP3 | other | 1.48E−02 | |
| ADAM19 | peptidase | 1.48E−02 | |
| GTx-560 | chemical reagent | 1.48E−02 | |
| ZNF433 | other | 1.48E−02 | |
| diacetylbis(4- | chemical reagent | 1.48E−02 | |
| methylthiosemicarbazonato)copper | | | |
| (II) | | | |
| cAMP-dependent protein kinase | chemical drug | 1.48E−02 | |
| inhibitor | | | |
| CGP 52608 | chemical reagent | 1.48E−02 | |
| SB202474 | chemical-kinase | 1.48E−02 | |
| | inhibitor | | |
| sterigmatocystin | chemical toxicant | 1.48E−02 | |
| benomyl | chemical toxicant | 1.48E−02 | |
| D-lactic acid | chemical- | 1.48E−02 | |
| | endogenous | | |
| | mammalian | | |
| cinacalcet | chemical drug | 1.48E−02 | |
| flurazepam | chemical drug | 1.48E−02 | |
| thiabendazole | chemical drug | 1.48E−02 | |
| fadrozole | chemical drug | 1.48E−02 | |
| naphthalene-1-2-dione | chemical toxicant | 1.48E−02 | |
| trans-7 8-dihydroxy-7 8- | chemical toxicant | 1.48E−02 | |
| dihydrobenzo(a)pyrene | | | |
| anthracene | chemical toxicant | 1.48E−02 | |
| nabumetone | chemical drug | 1.48E−02 | |
| 2-amino-3-methylimidazo(4 5- | chemical toxicant | 1.48E−02 | |
| f)quinoline | | | |
| 4-cresol | chemical toxicant | 1.48E−02 | |
| gemtuzumab ozogamicin | biologic drug | 1.48E−02 | |
| myrcene | chemical- | 1.48E−02 | |
| | endogenous non- | | |
| | mammalian | | |
| cineole | chemical drug | 1.48E−02 | |
| harmaline | chemical drug | 1.48E−02 | |
| erucic acid | chemical- | 1.48E−02 | |
| | endogenous non- | | |
| | mammalian | | |
| estramustine | chemical drug | 1.48E−02 | |
| Fe3+ | chemical- | 1.48E−02 | |
| | endogenous | | |
| | mammalian | | |
| Cr3+ | chemical reagent | 1.48E−02 | |
| entinostat | chemical drug | 1.49E−02 | |
| flutamide | chemical drug | 1.49E−02 | |
| fulvestrant | chemical drug | 1.51E−02 | [symbol] B3 NCOA3 SOD1 SQSTM1 VCAM1 |
| harmine | chemical- | 1.53E−02 | |
| | endogenous non- | | |
| | mammalian | | |
| EN1 | transcription | 1.53E−02 | |
| | regulator | | |
| mir-218 | microrna | 1.53E−02 | |
| BMX | kinase | 1.53E−02 | |
| UGCG | enzyme | 1.53E−02 | |
| APEX1 | enzyme | 1.53E−02 | |
| CYP51A1 | enzyme | 1.53E−02 | |
| PEX5L | ion channel | 1.53E−02 | |
| pentylenetetrazol | chemical drug | 1.53E−02 | |
| farnesyl pyrophosphate | chemical- | 1.53E−02 | |
| | endogenous | | |
| | mammalian | | |
| morphine | chemical drug | 1.53E−02 | [symbol] PP1R14C |
| fluticasone | chemical drug | 1.56E−02 | [symbol] 1A TPST1 TSC22D1 |
| GATA6 | transcription | 1.56E−02 | [symbol] 1 DLD IIYAL1 |
| | regulator | | |
| NEDD9 | other | 1.60E−02 | |
| IL1A | cytokine | 1.62E−02 | [symbol] IP2 NFKB1 TNFSF11 VCAM1 |
| IL6 | cytokine | 1.64E−02 | [symbol] 3A5 EGR2 HPGD ICOS IL15 ITGAM |
| | | | [symbol] 1A SC5D TNFSF11 VCAM1 |
| MAP3K14 | kinase | 1.65E−02 | |
| CD3E | transmembrane | 1.65E−02 | |
| | receptor | | |
| SB203580 | chemical-kinase | 1.69E−02 | [symbol] MMP2 NFKB1 PPARGC1A TNFSF11 |
| | inhibitor | | |
| camptothecin | chemical drug | 1.70E−02 | [symbol] XN3 FUT8 IQGAP2 MERTK NFKB1 |
| | | | [symbol] M1 |
| ibuprofen | chemical drug | 1.72E−02 | |
| propofol | chemical drug | 1.72E−02 | |
| tyrphostin AG 1478 | chemical-kinase | 1.74E−02 | |
| | inhibitor | | |
| HOXA10 | transcription | 1.75E−02 | [symbol] S1 RIT2 |
| | regulator | | |
| 15(S)-HETE | chemical- | 1.76E−02 | |
| | endogenous | | |
| | mammalian | | |
| dactolisib | chemical drug | 1.76E−02 | |
| LTB4R | g-protein coupled | 1.76E−02 | |
| | receptor | | |
| gallic acid | chemical- | 1.76E−02 | |
| | endogenous non- | | |
| | mammalian | | |
| spermidine | chemical- | 1.76E−02 | |
| | endogenous | | |
| | mammalian | | |
| Cd2+ | chemical toxicant | 1.76E−02 | |
| INSIC1 | other | 1.78E−02 | |
| TGFB3 | growth factor | 1.78E−02 | [symbol] C1A |
| isobutylmethylxanthine | chemical toxicant | 1.80E−02 | [symbol] C1A SYK |
| INSR | kinase | 1.82E−02 | [symbol] SD17B4 MMP2 PPARGC1A SC5D |
| CASZ1 | enzyme | 1.84E−02 | |
| MAFB | transcription | 1.84E−02 | |
| | regulator | | |
| propranolol | chemical drug | 1.84E−02 | |
| RAC1 | enzyme | 1.85E−02 | |
| DOCK8 | other | 1.91E−02 | |
| 5-hydroxytryptamine | chemical- | 1.91E−02 | |
| | endogenous | | |
| | mammalian | | |
| LHX1 | transcription | 1.92E−02 | |
| | regulator | | |
| ANGPT1 | growth factor | 1.98E−02 | |
| verapamil | chemical drug | 1.98E−02 | |
| PRKCA | kinase | 2.00E−02 | |
| FOSL1 | transcription | 2.01E−02 | |
| | regulator | | |
| leukotriene C4 | chemical- | 2.02E−02 | |
| | endogenous | | |
| | mammalian | | |
| fluoride | chemical- | 2.02E−02 | |
| | endogenous | | |
| | mammalian | | |
| PD 0325901 | chemical drug | 2.02E−02 | |
| Fcgr3 | group | 2.02E−02 | |
| Sod | group | 2.02E−02 | |
| ADRBK1 | kinase | 2.02E−02 | |
| DDR1 | kinase | 2.02E−02 | |
| TNFAIP2 | other | 2.02E−02 | |
| EDNRA | transmembrane | 2.02E−02 | |
| | receptor | | |
| ENPP2 | enzyme | 2.02E−02 | |
| isoquercitrin | chemical drug | 2.02E−02 | |
| kainic acid | chemical toxicant | 2.04E−02 | [symbol] O1 |
| SASH1 | other | 2.10E−02 | |
| GCG | other | 2.10E−02 | |
| TGFBR2 | kinase | 2.10E−02 | PN PTPN20 |
| Wnt | group | 2.11E−02 | |
| ADAM17 | peptidase | 2.11E−02 | |
| MGEA5 | enzyme | 2.14E−02 | RBB3 GABRA2 HMGCR HPGD SUCLG2 |
| losartan potassium | chemical drug | 2.15E−02 | |
| NFATC2 | transcription | 2.17E−02 | [symbol] C22D1 |
| | regulator | | |
| JUN | transcription | 2.18E−02 | [symbol] LMO1 MMP2 PTPRD SYK VAV3 VCAM1 |
| | regulator | | |
| EGR2 | transcription | 2.23E−02 | [symbol] L1 TNFSF11 |
| | regulator | | |
| mir-146 | microrna | 2.26E−02 | |
| S-nitrosoglutathione | chemical toxicant | 2.26E−02 | |
| DEF6 | other | 2.28E−02 | |
| TNFRSF6B | transmembrane | 2.28E−02 | |
| | receptor | | |
| ABCC8 | transporter | 2.28E−02 | |
| EFNB2 | other | 2.28E−02 | |
| IL1RL1 | transmembrane | 2.28E−02 | |
| | receptor | | |
| 2-acetylaminofluorene | chemical toxicant | 2.28E−02 | |
| allyl sulfide | chemical drug | 2.28E−02 | |
| TNFRSF1B | transmembrane | 2.30E−02 | |
| | receptor | | |
| cadmium | chemical toxicant | 2.30E−02 | |
| SPARC | other | 2.30E−02 | |
| ANGPT2 | growth factor | 2.33E−02 | SF11 VCAM1 |
| AHR | ligand-dependent | 2.35E−02 | G HMGCR ITGAM MMP2 NMT2 SOD1 |
| | nuclear receptor | | |
| PI3K (complex) | complex | 2.36E−02 | TPN12 SEMA6D SLC6A3 VCAM1 |
| TXNIP | other | 2.40E−02 | |
| 9 10-dimethyl-1 2-benzanthracene | chemical toxicant | 2.40E−02 | |
| acetaminophen | chemical drug | 2.43E−02 | 7B4 VCAM1 |
| Immunoglobulin | complex | 2.47E−02 | MMP2 VCAM1 |
| MITF | transcription | 2.47E−02 | SCAR PHACTR1 UVRAG |
| | regulator | | |
| poly rI:rC-RNA | biologic drug | 2.48E−02 | [symbol] G MMP2 NFKB1 STAM SUOX SYK |
| OSM | cytokine | 2.49E−02 | B3 FOXN3 GMPR IL15 LMO1 MMP2 |
| RET | kinase | 2.55E−02 | [symbol] |
| NPC1 | transporter | 2.56E−02 | |
| Ro31-8220 | chemical-kinase | 2.56E−02 | |
| | inhibitor | | |
| PECAM1 | other | 2.56E−02 | |
| WNT7A | cytokine | 2.56E−02 | |
| ACSL5 | enzyme | 2.56E−02 | |
| MUC4 | other | 2.56E−02 | |
| indirubin | chemical drug | 2.56E−02 | |
| metyrapone | chemical drug | 2.56E−02 | |
| EDN1 | cytokine | 2.57E−02 | [symbol] 1 VCAM1 |
| PTH | other | 2.58E−02 | [symbol] FSF11 |
| RORC | ligand-dependent | 2.58E−02 | UGGT2 |
| | nuclear receptor | | |
| bexarotene | chemical drug | 2.58E−02 | [symbol] AM1 |
| apigenin | chemical- | 2.62E−02 | |
| | endogenous non- | | |
| | mammalian | | |
| resveratrol | chemical drug | 2.66E−02 | PPARGC1A SOD1 SQSTM1 VCAM1 |
| KLF 15 | transcription | 2.72E−02 | |
| | regulator | | |
| cisplatin | chemical drug | 2.74E−02 | [symbol] B4 FOXN3 GPC5 HMGCR HYAL1 IL15 |
| | | | AM1 |
| CREBBP | transcription | 2.81E−02 | PKHD1 PPARGC1A RTP4 UTRN VCAM1 |
| | regulator | | |
| MAPK1 | kinase | 2.81E−02 | P2 PROS1 SUOX TNFSF11 TRIM5 |
| C5 | cytokine | 2.82E−02 | |
| LYL1 | transcription | 2.85E−02 | |
| | regulator | | |
| SIRT2 | transcription | 2.85E−02 | |
| | regulator | | |
| NFIA | transcription | 2.85E−02 | |
| | regulator | | |
| SLC6A3 | transporter | 2.85E−02 | |
| TNFRSF11A | transmembrane | 2.85E−02 | |
| | receptor | | |
| BID | other | 2.85E−02 | |
| NONO | other | 2.85E−02 | |
| dichlororibofuranosylbenzimidazole | chemical toxicant | 2.85E−02 | |
| docosahexaenoic acid | chemical drug | 2.88E−02 | CAM1 |
| BMI1 | transcription | 2.88E−02 | |
| | regulator | | |
| APOA1 | transporter | 2.88E−02 | |
| tegafur | chemical drug | 2.93E−02 | |
| ipilimumab | biologic drug | 2.93E−02 | |
| 2 2′ 4 4′-tetrabromodiphenyl ether | chemical reagent | 2.93E−02 | |
| DF 203 | chemical drug | 2.93E−02 | |
| Mitochondrial complex 1 | complex | 2.93E−02 | |
| NPS | other | 2.93E−02 | |
| des-Arg(10)-kallidin | chemical reagent | 2.93E−02 | |
| PLEKHM1 | other | 2.93E−02 | |
| NLRP10 | other | 2.93E−02 | |
| TAAR1 | g-protein coupled | 2.93E−02 | |
| | receptor | | |
| BTBD7 | other | 2.93E−02 | |
| GPR4 | g-protein coupled | 2.93E−02 | |
| | receptor | | |
| LRIG3 | other | 2.93E−02 | |
| EVX1 | transcription | 2.93E−02 | |
| | regulator | | |
| CBP-ICSBP-IRF-1-PU.1 | complex | 2.93E−02 | |
| ACAT1 | enzyme | 2.93E−02 | |
| FBLIM1 | other | 2.93E−02 | |
| RAP1B | enzyme | 2.93E−02 | |
| TRPC5 | ion channel | 2.93E−02 | |
| RBBP7 | transcription | 2.93E−02 | |
| | regulator | | |
| ATP1A1 | transporter | 2.93E−02 | |
| FAIM2 | other | 2.93E−02 | |
| IBSP | other | 2.93E−02 | |
| CCNC | other | 2.93E−02 | |
| HPGD | enzyme | 2.93E−02 | |
| CLCN3 | ion channel | 2.93E−02 | |
| mir-342 | microrna | 2.93E−02 | |
| mir-665 | microrna | 2.93E−02 | |
| GNAT1 | enzyme | 2.93E−02 | |
| EGFL7 | other | 2.93E−02 | |
| BAZ1A | other | 2.93E−02 | |
| PBK | kinase | 2.93E−02 | |
| GPR34 | g-protein coupled | 2.93E−02 | |
| | receptor | | |
| BCAN | other | 2.93E−02 | |
| LAMC2 | other | 2.93E−02 | |
| TXNDC5 | enzyme | 2.93E−02 | |
| RNF139 | enzyme | 2.93E−02 | |
| DRP2 | other | 2.93E−02 | |
| RHCE/RHD | transporter | 2.93E−02 | |
| cyclic des-acyl ghrelin (6-13) | biologic drug | 2.93E−02 | |
| PNRC1 | other | 2.93E−02 | |
| TRIP11 | transcription | 2.93E−02 | |
| | regulator | | |
| Sfl | other | 2.93E−02 | |
| gimeracil | chemical drug | 2.93E−02 | |
| phthalic acid | chemical- | 2.93E−02 | |
| | endogenous non- | | |
| | mammalian | | |
| palytoxin | chemical toxicant | 2.93E−02 | |
| alpha-endosulfan | chemical toxicant | 2.93E−02 | |
| primaquine | chemical drug | 2.93E−02 | |
| acetoxyacetylaminofluorene | chemical toxicant | 2.93E−02 | |
| gabazine | chemical drug | 2.93E−02 | |
| oxazepam | chemical drug | 2.93E−02 | |
| dibenzo(al)pyrene | chemical toxicant | 2.93E−02 | |
| benzo(a)pyrene-7 8-dione | chemical toxicant | 2.93E−02 | |
| procaine | chemical drug | 2.93E−02 | |
| lavendustin A | chemical-kinase | 2.93E−02 | |
| | inhibitor | | |
| all-trans-4-Oxo-retinoic acid | chemical- | 2.93E−02 | |
| | endogenous | | |
| | mammalian | | |
| indolo(3 2-b)carbazole | chemical reagent | 2.93E−02 | |
| linalool | chemical- | 2.93E−02 | |
| | endogenous non- | | |
| | mammalian | | |
| ginkgolide A | chemical- | 2.93E−02 | |
| | endogenous non- | | |
| | mammalian | | |
| KT 5926 | chemical-kinase | 2.93E−02 | |
| | inhibitor | | |
| sulfur | chemical- | 2.93E−02 | |
| | endogenous | | |
| | mammalian | | |
| trehalose dimycolate | chemical-other | 2.93E−02 | |
| elaidic acid | chemical- | 2.93E−02 | |
| | endogenous | | |
| | mammalian | | |
| epoxyeicosatrienoic acid | chemical-other | 2.93E−02 | |
| polyinosinic acid | chemical reagent | 2.93E−02 | |
| E64 | chemical- | 2.93E−02 | |
| | endogenous non- | | |
| | mammalian | | |
| 17-epiestriol | chemical- | 2.93E−02 | |
| | endogenous | | |
| | mammalian | | |
| 3 20-pregnanedione | chemical- | 2.93E−02 | |
| | endogenous | | |
| | mammalian | | |
| N-Ac-Leu-Leu-norleucinal | chemical-protease | 2.97E−02 | |
| | inhibitor | | |
| PROC | peptidase | 3.05E−02 | |
| FOXO1 | transcription | 3.07E−02 | YOU1 IL15 PPARGC1A SEMA6D VCAM1 |
| | regulator | | |
| IL33 | cytokine | 3.09E−02 | |
| SRC | kinase | 3.10E−02 | |
| benzyloxycarbonyl-Leu-Leu-Leu | chemical-protease | 3.16E−02 | [symbol] 2 SOD1 SQSTM1 VCAM1 |
| aldehyde | inhibitor | | |
| ADCY | group | 3.16E−02 | |
| Ncoa-Nrli2-Rxra | complex | 3.16E−02 | |
| NADPH oxidase | complex | 3.16E−02 | |
| Lymphotoxin | complex | 3.16E−02 | |
| CYP27A1 | enzyme | 3.16E−02 | |
| NRTN | growth factor | 3.16E−02 | |
| 1-methyl-4-phenylpyridinium | chemical toxicant | 3.16E−02 | |
| fumonisin B1 | chemical toxicant | 3.16E−02 | |
| ammonium chloride | chemical drug | 3.16E−02 | |
| leuprolide | biologic drug | 3.16E−02 | |
| STK11 | kinase | 3.20E−02 | H VAV3 |
| Alpha catenin | group | 3.20E−02 | |
| homocysteine | chemical- | 3.21E−02 | |
| | endogenous | | |
| | mammalian | | |
| TCR | complex | 3.22E−02 | NFKB1 TNFSF11 TSC22D1 |
| CHUK | kinase | 3.26E−02 | SQSTM1 VCAM1 |
| XRP1 | transcription | 3.26E−02 | SF11 VCAM1 |
| | regulator | | |
| androgen | chemical drug | 3.28E−02 | VAV3 |
| curcumin | chemical drug | 3.29E−02 | NFKB1 PPARGC1A SOD1 TNFSF11 |
| POU2F1 | transcription | 3.30E−02 | |
| | regulator | | |
| hydrogen peroxide | chemical- | 3.31E−02 | [symbol] MGCR MMP2 PPARGC1A SC5D SOD1 |
| | endogenous | | |
| | mammalian | | |
| NFYA | transcription | 3.34E−02 | |
| | regulator | | |
| TBK1 | kinase | 3.34E−02 | |
| NEkB (complex) | complex | 3.36E−02 | HIVEP1 ICOS IL15 ITGAM KRT6B MMP2 |
| TNFSF11 | cytokine | 3.38E−02 | [symbol] CAR TNFSF11 VCAM1 |
| LTBR | transmembrane | 3.40E−02 | |
| | receptor | | |
| ATG7 | enzyme | 3.40E−02 | |
| FOXC2 | transcription | 3.40E−02 | |
| | regulator | | |
| omeprazole | chemical drug | 3.40E−02 | |
| PML | transcription | 3.41E−02 | QSTM1 |
| | regulator | | |
| IRF7 | transcription | 3.46E−02 | 45 |
| | regulator | | |
| deferoxamine | chemical drug | 3.46E−02 | D1 VCAM1 |
| 11 12-epoxyeicosatrienoic acid | chemical- | 3.47E−02 | |
| | endogenous | | |
| | mammalian | | |
| puromycin | chemical- | 3.47E−02 | |
| | endogenous non- | | |
| | mammalian | | |
| HTATIP2 | transcription | 3.47E−02 | |
| | regulator | | |
| SIM2 | transcription | 3.47E−02 | |
| | regulator | | |
| EZR | other | 3.47E−02 | |
| F10 | peptidase | 3.47E−02 | |
| carvedilol | chemical drug | 3.47E−02 | |
| chelerythrine | chemical drug | 3.47E−02 | |
| BMP7 | growth factor | 3.51E−02 | [symbol] GC1A |
| Sb202190 | chemical-kinase | 3.51E−02 | [symbol] C1A |
| | inhibitor | | |
| CSF2 | cytokine | 3.55E−02 | L15 ITGAM ITGAX MMP2 NFKB1 |
| ELK1 | transcription | 3.58E−02 | |
| | regulator | | |
| ADM | other | 3.58E−02 | |
| streptozocin | chemical drug | 3.64E−02 | [symbol] C1A SLC6A3 SOD1 |
| PPARG | ligand-dependent | 3.66E−02 | CR HYOU1 PCTP PPARGC1A PPP2R2B |
| | nuclear receptor | | |
| tamoxifen | chemical drug | 3.66E−02 | [symbol] BB4 HMGCR SQSTM1 |
| IL10 | cytokine | 3.69E−02 | [symbol] GD MERTK MMP2 TNFSF11 VCAM1 |
| Ca2+ | chemical- | 3.73E−02 | OSCAR TCHH TNFSF11 |
| | endogenous | | |
| | mammalian | | |
| 5-O-mycolyl beta araf-(1->2)-5-O- | chemical- | 3.74E−02 | |
| mycolyl-alpha-araf-(1->1′)-glycerol | endogenous non- | | |
| | mammalian | | |
| cholecalciferol | chemical- | 3.74E−02 | |
| | endogenous | | |
| | mammalian | | |
| ADRA1A | g-protein coupled | 3.77E−02 | |
| | receptor | | |
| anisomycin | chemical- | 3.77E−02 | |
| | endogenous non- | | |
| | mammalian | | |
| JINK1/2 | group | 3.80E−02 | |
| NTN1 | other | 3.80E−02 | |
| PAX2 | transcription | 3.80E−02 | |
| | regulator | | |
| MECOM | transcription | 3.80E−02 | |
| | regulator | | |
| fluconazole | chemical drug | 3.80E−02 | |
| pifithrin alpha | chemical reagent | 3.80E−02 | |
| alendronic acid | chemical drug | 3.80E−02 | |
| probucol | chemical drug | 3.80E−02 | |
| cyclic AMP | chemical- | 3.88E−02 | IL15 PDE4D PPARGC1A |
| | endogenous | | |
| | mammalian | | |
| E. coli B5 lipopolysaccharide | chemical- | 3.88E−02 | PARGC1A SOD1 TNFSF11 |
| | endogenous non- | | |
| | mammalian | | |
| ERBB4 | kinase | 3.88E−02 | |
| INS | other | 3.95E−02 | [symbol] SOD1 |
| ZBTB20 | transcription | 3.90E−02 | |
| | regulator | | |
| vitamin D | chemical drug | 3.96E−02 | |
| N-nitro-L-arginine methyl ester | chemical drug | 4.02E−02 | |
| FOXO3 | transcription | 4.11E−02 | [symbol] 1A SOD1 |
| | regulator | | |
| thapsigargin | chemical toxicant | 4.11E−02 | VCAM1 |
| cycloheximide | chemical reagent | 4.13E−02 | IT4 DHRS2 ITGAM MMP2 TNFSF11 |
| CRTC2 | other | 4.14E−02 | |
| CABA | chemical- | 4.14E−02 | |
| | endogenous | | |
| | mammalian | | |
| selenomethylselenocysteine | chemical- | 4.14E−02 | |
| | endogenous | | |
| | mammalian | | |
| sucrose | chemical- | 4.14E−02 | |
| | endogenous | | |
| | mammalian | | |
| MAPKAPK2 | kinase | 4.16E−02 | |
| NKX3-1 | transcription | 4.16E−02 | |
| | regulator | | |
| NEKBIB | transcription | 4.16E−02 | |
| | regulator | | |
| DCN | other | 4.16E−02 | |
| raloxifene | chemical drug | 4.21E−02 | [symbol] FSF11 |
| PRKCD | kinase | 4.31E−02 | [symbol] M1 |
| Nfat (family) | group | 4.31E−02 | |
| IL12A | cytokine | 4.36E−02 | |
| TRAF6 | enzyme | 4.36E−02 | |
| CUX1 | transcription | 4.36E−02 | |
| | regulator | | |
| Go 6976 | chemical-kinase | 4.36E−02 | |
| | inhibitor | | |
| Rp-8-Br-cGMPS | chemical-kinase | 4.37E−02 | |
| | inhibitor | | |
| ergosterol-5 8-peroxide | chemical- | 4.37E−02 | |
| | endogenous non- | | |
| | mammalian | | |
| glycodeoxycholic acid | chemical- | 4.37E−02 | |
| | endogenous | | |
| | mammalian | | |
| taurochenodeoxycholate | chemical- | 4.37E−02 | |
| | endogenous | | |
| | mammalian | | |
| kawain | chemical- | 4.37E−02 | |
| | endogenous non- | | |
| | mammalian | | |
| benzo(a)pyrene 7 8-dihydrodiol | chemical toxicant | 4.37E−02 | |
| 14 15-DIIET | chemical- | 4.37E−02 | |
| | endogenous | | |
| | mammalian | | |
| methysticin | chemical reagent | 4.37E−02 | |
| 1 2 5 6-dibenzanthracene | chemical toxicant | 4.37E−02 | |
| diosmin | chemical drug | 4.37E−02 | |
| carfilzomib | biologic drug | 4.37E−02 | |
| fluoroquinolone | chemical drug | 4.37E−02 | |
| prochloraz | chemical reagent | 4.37E−02 | |
| CpG ODN 1555 | chemical reagent | 4.37E−02 | |
| dietary fat derivative | chemical drug | 4.37E−02 | |
| ATP6AP2 | transporter | 4.37E−02 | |
| patulin | chemical toxicant | 4.37E−02 | |
| TMBIM1 | other | 4.37E−02 | |
| PIH1D3 | other | 4.37E−02 | |
| GLDN | other | 4.37E−02 | |
| FREM1 | other | 4.37E−02 | |
| ZXDC | transcription | 4.37E−02 | |
| | regulator | | |
| GALNT6 | enzyme | 4.37E−02 | |
| SPON2 | other | 4.37E−02 | |
| DERL1 | other | 4.37E−02 | |
| FREM2 | other | 4.37E−02 | |
| Integrin alpha 3 beta 1 | complex | 4.37E−02 | |
| ITGBL1 | other | 4.37E−02 | |
| P2RY6 | g-protein coupled | 4.37E−02 | |
| | receptor | | |
| PTPN23 | phosphatase | 4.37E−02 | |
| Ap1 gamma | group | 4.37E−02 | |
| Eotaxin | group | 4.37E−02 | |
| ADRBK2 | kinase | 4.37E−02 | |
| RPL13A | other | 4.37E−02 | |
| NRCAM | other | 4.37E−02 | |
| BPTF | transcription | 4.37E−02 | |
| | regulator | | |
| HAO1 | enzyme | 4.37E−02 | |
| mir-541 | microrna | 4.37E−02 | |
| miR-485-3p (and other miRNAs | mature microrna | 4.37E−02 | |
| w/seed UCAUACA) | | | |
| PHGDH | enzyme | 4.37E−02 | |
| VSX2 | transcription | 4.37E−02 | |
| | regulator | | |
| SLN | other | 4.37E−02 | |
| PFN1 | other | 4.37E−02 | |
| TCF20 | transcription | 4.37E−02 | |
| | regulator | | |
| GFRA2 | transmembrane | 4.37E−02 | |
| | receptor | | |
| ADRA2A | g-protein coupled | 4.37E−02 | |
| | receptor | | |
| GNG2 | enzyme | 4.37E−02 | |
| ANK1 | other | 4.37E−02 | |
| NPHS2 | other | 4.37E−02 | |
| TFPI2 | other | 4.37E−02 | |
| ITGAD | other | 4.37E−02 | |
| DHCR7 | enzyme | 4.37E−02 | |
| AHCY | enzyme | 4.37E−02 | |
| NR2F6 | ligand-dependent | 4.37E−02 | |
| | nuclear receptor | | |
| KLF16 | other | 4.37E−02 | |
| DNM2 | enzyme | 4.37E−02 | |
| (E)-1-(2-nitrovinyl)naphthalene | chemical reagent | 4.37E−02 | |
| (E)-9-(2-nitrovinyl)anthracene | chemical reagent | 4.37E−02 | |
| N-butyryl arginine | chemical reagent | 4.37E−02 | |
| 3-hydroxybutyrate arginate | chemical reagent | 4.37E−02 | |
| phenylacetic acid | chemical- | 4.37E−02 | |
| | endogenous | | |
| | mammalian | | |
| anastrozole | chemical drug | 4.37E−02 | |
| nilutamide | chemical drug | 4.37E−02 | |
| dichlorodiphenyl dichloroethylene | chemical toxicant | 4.37E−02 | |
| amantadine | chemical drug | 4.37E−02 | |
| PTIO | chemical reagent | 4.37E−02 | |
| oxonic acid | chemical drug | 4.37E−02 | |
| bongkrekic acid | chemical toxicant | 4.37E−02 | |
| trimetazidine | chemical drug | 4.37E−02 | |
| apomine | chemical drug | 4.37E−02 | |
| ropivacaine | chemical drug | 4.37E−02 | |
| 3-nitrobenzanthrone | chemical toxicant | 4.37E−02 | |
| myristoylated PKCzeta | chemical-kinase | 4.37E−02 | |
| pseudosubstrate peptide inhibitor | inhibitor | | |
| (Ala9)-autocamtide-2 | chemical-kinase | 4.37E−02 | |
| | inhibitor | | |
| indole | chemical- | 4.37E−02 | |
| | endogenous | | |
| | mammalian | | |
| zeaxanthin | chemical drug | 4.37E−02 | |
| acacetin | chemical- | 4.37E−02 | |
| | endogenous non- | | |
| | mammalian | | |
| taxifolin | chemical- | 4.37E−02 | |
| | endogenous non- | | |
| | mammalian | | |
| physostigmine | chemical drug | 4.37E−02 | |
| latanoprost | chemical drug | 4.37E−02 | |
| glyphosate | chemical toxicant | 4.37E−02 | |
| arginine butyrate | chemical drug | 4.37E−02 | |
| chitosan | chemical- | 4.37E−02 | |
| | endogenous non- | | |
| | mammalian | | |
| megestrol acetate | chemical drug | 4.37E−02 | |
| LDLR | transporter | 4.46E−02 | |
| Ikb | group | 4.50E−02 | |
| MTDH | transcription | 4.50E−02 | |
| | regulator | | |
| AKT3 | kinase | 4.50E−02 | |
| LCAT | enzyme | 4.50E−02 | |
| RC3H1 | enzyme | 4.50E−02 | |
| KN-62 | chemical-kinase | 4.50E−02 | |
| | inhibitor | | |
| evodiamine | chemical- | 4.50E−02 | |
| | endogenous non- | | |
| | mammalian | | |
| RARA | ligand-dependent | 4.50E−02 | KLF3-AS1 RTP4 XK |
| | nuclear receptor | | |
| glucagon | biologic drug | 4.57E−02 | |
| luteolin | chemical- | 4.57E−02 | |
| | endogenous non- | | |
| | mammalian | | |
| ASCL1 | transcription | 4.61E−02 | |
| | regulator | | |
| SAMSN1 | other | 4.61E−02 | |
| 8-bromo-cAMP | chemical reagent | 4.62E−02 | PPARGC1A |
| FOXA1 | transcription | 4.66E−02 | |
| | regulator | | |
| FAS | transmembrane | 4.74E−02 | ERTK PTPRN2 SYK TLN2 VCAM1 |
| | receptor | | |
| PRL | cytokine | 4.75E−02 | DPN SOD1 TNFSF11 |
| miR-141-3p (and other miRNAs | mature microrna | 4.78E−02 | |
| w/seed AACACUG) | | | |
| SERPINF1 | other | 4.78E−02 | |
| BIRC5 | other | 4.78E−02 | |
| thioctic acid | chemical drug | 4.78E−02 | |
| SPP1 | cytokine | 4.83E−02 | [symbol] FSF11 |
| BMP | group | 4.86E−02 | |
| BGN | other | 4.86E−02 | |
| ICOSLG/LOC102723996 | other | 4.86E−02 | |
| PKM | kinase | 4.86E−02 | |
| ITGA1 | other | 4.86E−02 | |
| DPP4 | peptidase | 4.86E−02 | |
| TRPV4 | ion channel | 4.86E−02 | |
| HSPD1 | enzyme | 4.86E−02 | |
| MED1 | transcription | 4.86E−02 | |
| | regulator | | |
| methyl-beta-cyclodextrin | chemical drug | 4.86E−02 | |
| NOTCH1 | transcription | 4.86E−02 | [symbol] K TNFSF11 |
| | regulator | | |
| tetrachlorodibenzodioxin | chemical toxicant | 4.88E−02 | [symbol] B3 ESRRG ITGAX NMT2 SLCO3A1 SOD1 |
| Pka | complex | 4.91E−02 | [symbol] F11 |
| TNFSF10 | cytokine | 4.93E−02 | |

^{A}shows the upstream regulators;
^{B}shows whether the upstream regulator is a chemical drug, transcription regulator among others;
^{C}shows the significance of the role of this regulator in gene regulation;
^{D}shows the target genes of the upstream regulator which are also the target genes of the human CRISPRs. [symbol]
indicates data missing or illegible when filed

[0063] To further analyse the human CRISPR controlled gene regulation during different (a)biotic conditions a microarray platform the Human Genome U133 Plus 2.0 Array for Affymetrix was explored. The probe sequences and annotation of this Affymetrix chip were downloaded and then uploaded into Galaxy software analyses tool and transformed into a Blast database using a standard software package in Galaxy (https://bioinf-galaxian.erasmusmc.nl/galaxy/). Secondly, the human CRISPR sequences were separated in a group containing only the spacer sequences and in a group containing only the repeat sequences. These were also uploaded into the Galaxy software analysis tool. After BLAST analyses we retrieved a significant hit with a human CRISPR spacer sequence for more than 2000 probes of the Human Genome U133 Plus 2.0 Array (Table 6).

TABLE 6
Affymetrix probes harbor significant identity with the human
CRISPR spacers.

| SEQ ID NO | Probe Set ID | E-Value | Gene Target Symbol^{E} |
|---|---|---|---|
| 5927 | 1562661_at | 1.00E−06 | — |
| 4064 | 239410_at | 1.75E−06 | — |
| 7250 | 210230_at | 5.00E−08 | — |
| 9629 | 234590_x_at | 2.00E−07 | — |
| 4599 | 238016_s_at | 4.00E−08 | — |
| 6399 | 232273_at | 4.00E−08 | — |
| 8195 | 230580_at | 8.10E−07 | — |
| 2750 | 1569527_at | 5.00E−07 | — |
| 5856 | 1566501_at | 1.00E−06 | — |
| 3595 | 1557580_at | 8.00E−08 | — |
| 9831 | 234753_x_at | 5.00E−08 | — |
| 3020 | 1563721_at | 1.00E−06 | — |
| 4331 | 205183_at | 2.00E−07 | — |
| 8960 | 1560118_at | 6.00E−09 | — |
| 3595 | 1566541_at | 3.01E−08 | — |
| 8384 | 216692_at | 5.00E−07 | — |
| 1038 | 1554963_at | 4.50E−07 | — |
| 185 | 1569182_at | 2.80E−07 | — |
| 6399 | 243768_at | 5.00E−07 | — |
| 1038 | 1554964_x_at | 4.50E−07 | — |
| 8678 | 230461_s_at | 5.00E−21 | — |
| 8195 | 215958_at | 3.00E−07 | — |
| 4331 | 1557335_at | 5.00E−08 | — |
| 5856 | 234247_at | 4.00E−08 | — |
| 2700 | 1556521_a_at | 4.00E−12 | — |
| 3395 | 217482_at | 1.40E−06 | — |
| 63 | 1565857_at | 5.00E−09 | — |
| 7988 | 1557774_at | 2.36E−08 | — |
| 3595 | 1557581_x_at | 8.00E−08 | — |
| 7665 | 234574_at | 3.00E−10 | — |
| 8195 | 224086_at | 2.70E−07 | — |
| 5927 | 241867_at | 2.50E−07 | — |
| 4475 | 1559434_at | 8.00E−08 | — |
| 6860 | 237187_at | 1.00E−21 | — |
| 5927 | 1558889_at | 5.75E−07 | — |
| 4064 | 1569416_at | 1.25E−07 | — |
| 4865 | 242495_at | 1.50E−07 | — |
| 8823 | 220874_at | 8.00E−09 | — |
| 4331 | 238812_at | 2.00E−06 | — |
| 8195 | 238301_at | 1.00E−08 | — |
| 4331 | 242256_x_at | 2.00E−07 | — |
| 7461 | 216767_at | 4.00E−07 | — |
| 2836 | 1562642_at | 3.00E−13 | — |
| 6113 | 1566425_at | 1.00E−22 | — |
| 250 | 1569603_at | 4.00E−07 | — |
| 6009 | 1562553_at | 3.00E−08 | — |
| 8407 | 241468_at | 1.00E−12 | — |
| 676 | 233235_x_at | 5.00E−07 | — |
| 9005 | 234654_at | 1.00E−13 | — |
| 9101 | 1562586_at | 3.00E−15 | — |
| 8198 | 1560230_at | 2.00E−07 | — |
| 4064 | 1561737_at | 1.00E−09 | — |
| 6914 | 1564984_at | 4.00E−11 | — |
| 8792 | 242795_at | 1.00E−11 | — |
| 7129 | 1555664_at | 9.00E−10 | — |
| 8195 | 215928_at | 1.00E−08 | — |
| 9342 | 242924_at | 9.00E−25 | — |
| 5170 | 1561642_at | 4.00E−07 | — |
| 8960 | 1559724_at | 2.00E−09 | — |
| 558 | 233716_at | 1.00E−04 | — |
| 559 | 217052_x_at | 0.002034 | — |
| 581 | 221788_at | 0.005 | PGM3 |
| 592 | 227931_at | 0.001 | INO80D |
| 592 | 231798_at | 0.004 | NOG |
| 639 | 205481_at | 6.00E−19 | ADORA1 |
| 641 | 1555433_at | 6.00E−06 | SLC39A14 |
| 653 | 234659_at | 3.00E−04 | — |
| 660 | 1569768_at | 1.00E−04 | — |
| 660 | 1569770_x_at | 0.001319 | — |
| 662 | 244172_at | 5.40E−04 | — |
| 662 | 235662_at | 0.004 | — |
| 662 | 224322_at | 0.004 | ARID4B |
| 662 | 215102_at | 0.002 | DPY19L1P1 |
| 669 | 235175_at | 2.48E−04 | GBP4 |
| 669 | 219724_s_at | 2.98E−04 | TESPA1 |
| 676 | 216189_at | 8.00E−05 | — |
| 676 | 232441_at | 2.00E−06 | KRR1 |
| 676 | 1560119_at | 7.00E−06 | LOC389634 |
| 676 | 202707_at | 1.54E−04 | UMPS |
| 683 | 227173_s_at | 0.004 | BACH2 |
| 687 | 233715_at | 0.002 | — |
| 687 | 1559026_at | 5.00E−05 | LOC100506599 |
| 720 | 215607_x_at | 5.10E−04 | — |
| 779 | 217704_x_at | 0.001505 | SUZ12P |
| 796 | 1559125_at | 7.00E−06 | — |
| 804 | 236247_at | 0.004 | NSUN4 |
| 807 | 1563074_at | 1.00E−05 | LOC255654 |
| 5679 | 207235_s_at | 0.005 | GRM5 |
| 6075 | 235582_at | 0.003 | E2F2 |
| 6092 | 213897_s_at | 1.00E−13 | MRPL23 |
| 5711 | 1564212_at | 0.001 | — |
| 6105 | 39763_at | 1.00E−12 | HPX |
| 6131 | 1559530_at | 4.00E−06 | — |
| 6131 | 240025_x_at | 1.00E−05 | — |
| 6131 | 215763_at | 5.00E−04 | — |
| 6131 | 231843_at | 4.05E−04 | DDX55 |
| 6131 | 210005_at | 6.00E−04 | GART |
| 6131 | 236255_at | 6.00E−04 | PLEKHG4B |
| 6131 | 204477_at | 6.00E−04 | RABIF |
| 6131 | 233321_x_at | 5.00E−05 | LOC90834 |
| 6131 | 222196_at | 4.05E−04 | LOC389906 |
| 5717 | 232875_at | 5.40E−04 | — |
| 5717 | 242025_at | 0.001 | — |
| 6194 | 241924_at | 0.001 | MECP2 |
| 6240 | 242526_at | 3.00E−04 | — |
| 6240 | 225690_at | 3.00E−04 | CDK12 |
| 6240 | 218988_at | 8.00E−05 | SLC35E3 |
| 6240 | 1559870_at | 2.00E−05 | LOC100129129 |
| 6249 | 1568864_at | 5.56E−04 | LOC100131691 |
| 6251 | 1560542_at | 5.00E−06 | MCM3AP-AS1 |
| 6266 | 1558315_s_at | 2.70E−05 | HOOK3 |
| 6266 | 220934_s_at | 0.003 | TMEM223 |
| 6267 | 201800_s_at | 0.001 | OSBP |
| 5732 | 231886_at | 3.83E−04 | LOC100134822 |
| 6310 | 216165_at | 3.00E−04 | — |
| 6310 | 208233_at | 1.00E−04 | PDPN |
| 6323 | 236854_at | 0.004 | LINC00494 |
| 5736 | 221164_x_at | 3.75E−06 | CHST5 |
| 6365 | 232790_at | 2.00E−07 | LOC100506054 |
| 6375 | 220335_x_at | 4.62E−04 | CES3 |
| 6381 | 1560540_x_at | 7.00E−06 | — |
| 6399 | 234492_at | 7.00E−06 | — |
| 6399 | 1565802_at | 0.001 | — |
| 6399 | 209527_at | 3.00E−04 | EXOSC2 |
| 6399 | 1566140_at | 2.00E−06 | HOPX |
| 6399 | 242377_x_at | 3.65E−06 | THUMPD3 |
| 6399 | 240617_at | 3.00E−04 | LOC100287098 |
| 6399 | 239083_at | 2.00E−07 | ZNF786 |
| 6411 | 232910_at | 7.00E−05 | BBIP1 |
| 6411 | 216424_at | 0.001433 | CD4 |
| 6416 | 1557590_at | 6.00E−04 | PARD6G-AS1 |
| 6430 | 239603_x_at | 9.00E−05 | — |
| 6430 | 233315_at | 6.50E−04 | — |
| 6430 | 241686_x_at | 0.001024 | — |
| 6430 | 234565_x_at | 0.001335 | — |
| 6430 | 1570065_at | 0.001733 | — |
| 6430 | 1561346_at | 0.0025 | — |
| 6430 | 222961_at | 0.0035 | — |
| 6430 | 1557478_at | 0.0035 | — |
| 6430 | 234423_x_at | 0.004 | — |
| 6430 | 1560781_at | 3.43E−04 | DNIID1 |
| 6430 | 224275_at | 0.001334 | GPR98 |
| 6430 | 232703_at | 0.001 | GLUD1P7 |
| 6430 | 218637_at | 0.0035 | IMPACT |
| 6430 | 1553265_at | 0.0035 | SLC23A3 |
| 6430 | 234697_x_at | 0.004 | TAMM41 |
| 6430 | 1558253_x_at | 9.67E−04 | ZNF587 /// ZNF587B |
| 6430 | 1558251_a_at | 9.67E−04 | ZNF587 /// ZNF587B |
| 6431 | 1569409_x_at | 7.03E−04 | — |
| 6431 | 215387_x_at | 8.11E−04 | — |
| 6431 | 207860_at | 1.00E−04 | NCR1 |
| 6431 | 206482_at | 1.80E−04 | PTK6 |
| 6431 | 231938_at | 4.07E−04 | SGOL1 |
| 6431 | 1555363_s_at | 1.10E−07 | LOC284440 |
| 10004 | 230063_at | 9.00E−05 | ZNF264 |
| 6515 | 1564413_at | 5.48E−04 | FLJ36116 |
| 6583 | 244869_at | 1.00E−04 | — |
| 6583 | 224667_x_at | 1.00E−04 | ANAPC16 |
| 6583 | 215058_at | 0.001 | DENND5B |
| 6619 | 1553882_at | 8.00E−04 | — |
| 6634 | 215255_at | 0.001502 | IGSF9B |
| 6647 | 240698_s_at | 2.00E−04 | — |
| 6647 | 239790_s_at | 2.00E−04 | — |
| 6647 | 241737_x_at | 2.57E−04 | — |
| 6647 | 1570308_at | 3.47E−04 | — |
| 6647 | 239817_at | 5.10E−04 | — |
| 6647 | 1563210_at | 0.004 | — |
| 6647 | 1568850_at | 7.33E−05 | CCBP2 |
| 6647 | 214666_x_at | 4.28E−04 | IREB2 |
| 6647 | 206370_at | 0.003 | PIK3CG |
| 6647 | 214750_at | 2.00E−04 | PLAC4 |
| 6648 | 242321_at | 5.00E−05 | PTPN14 |
| 6661 | 1558275_at | 1.80E−04 | — |
| 6661 | 215893_x_at | 3.36E−04 | — |
| 6661 | 242609_x_at | 5.00E−04 | — |
| 6661 | 217639_at | 5.00E−04 | — |
| 6661 | 233627_at | 7.18E−04 | — |
| 6661 | 234656_x_at | 7.80E−04 | — |
| 6661 | 1569474_at | 8.02E−04 | — |
| 6661 | 215604_x_at | 8.70E−04 | — |
| 6661 | 1556931_at | 0.001251 | — |
| 6661 | 234494_x_at | 0.00165 | — |
| 6661 | 215349_at | 7.63E−04 | BTBD18 |
| 6661 | 1555346_at | 1.26E−04 | CDC20B |
| 6661 | 232065_x_at | 8.04E−04 | CENPL |
| 6661 | 242649_x_at | 3.10E−04 | HMGN2P46 |
| 6661 | 215112_x_at | 6.17E−04 | MCF2L2 |
| 6661 | 215067_x_at | 6.52E−04 | PRDX2 |
| 6661 | 1560770_at | 5.51E−04 | PABPC1 |
| 6661 | 233852_at | 4.16E−05 | POLH |
| 6661 | 1560445_x_at | 0.0015 | ARHGEF1 |
| 6661 | 227196_at | 0.001077 | RHPN2 |
| 6661 | 232392_at | 5.02E−05 | SRSF3 |
| 6661 | 213936_x_at | 5.01E−04 | SFTPB |
| 6661 | 237469_at | 0.0025 | TOP2A |
| 6661 | 1562566_at | 0.001427 | TRAF3IP2-AS1 |
| 6661 | 203148_s_at | 9.38E−04 | TRIM14 |
| 6661 | 1555322_at | 0.001174 | PP2672 |
| 6661 | 223845_at | 0.001333 | VSIG10 |
| 6672 | 216425_at | 0.00204 | — |
| 6672 | 208154_at | 0.004 | — |
| 6672 | 242265_at | 0.00235 | BRD8 |
| 6672 | 233649_at | 3.64E−04 | KATNAL2 |
| 6674 | 1560511_at | 0.003 | — |
| 6713 | 229711_s_at | 5.00E−10 | MDM2 |
| 6727 | 1560721_at | 0.001467 | — |
| 6739 | 233644_at | 7.67E−04 | KATNAL2 |
| 6747 | 225864_at | 0.003 | FAM84B |
| New 11 | 215628_x_at | 7.30E−04 | — |
| 6786 | 233554_at | 2.00E−06 | — |
| 6786 | 1563026_at | 0.001 | — |
| 6787 | 227683_x_at | 3.00E−07 | NUDT4 |
| 6807 | 206876_at | 0.002 | SIM1 |
| 6811 | 233431_x_at | 1.33E−05 | — |
| 6811 | 1556658_a_at | 1.69E−04 | — |
| 6811 | 232495_x_at | 1.90E−04 | — |
| 6811 | 211411_at | 2.32E−04 | — |
| 6811 | 1566538_at | 2.49E−04 | — |
| 6811 | 1562823_at | 2.61E−04 | — |
| 6811 | 1565821_at | 2.64E−04 | — |
| 6811 | 1565820_x_at | 2.64E−04 | — |
| 6811 | 1565819_at | 2.64E−04 | — |
| 6811 | 208082_x_at | 2.89E−04 | — |
| 6811 | 222319_at | 3.00E−04 | — |
| 6811 | 215868_x_at | 3.29E−04 | — |
| 6811 | 234578_at | 3.40E−04 | — |
| 6811 | 215862_at | 4.03E−04 | — |
| 6811 | 211444_at | 4.62E−04 | — |
| 6811 | 232580_x_at | 5.76E−04 | — |
| 6811 | 217571_at | 5.94E−04 | — |
| 6811 | 1569577_x_at | 6.26E−04 | — |
| 6811 | 1552975_x_at | 6.57E−04 | — |
| 6811 | 1552974_at | 6.57E−04 | — |
| 6811 | 220700_at | 6.88E−04 | — |
| 6811 | 1562063_x_at | 6.91E−04 | — |
| 6811 | 1566953_x_at | 7.04E−04 | — |
| 6811 | 1566952_at | 7.04E−04 | — |
| 6811 | 1558672_at | 7.18E−04 | — |
| 6811 | 1562062_at | 7.52E−04 | — |
| 6811 | 222295_x_at | 8.26E−04 | — |
| 6811 | 239333_x_at | 8.49E−04 | — |
| 6811 | 233900_at | 8.71E−04 | — |
| 6811 | 216229_x_at | 0.001001 | — |
| 6811 | 217703_x_at | 0.001049 | — |
| 6811 | 1561966_at | 0.001086 | — |
| 6811 | 216043_x_at | 0.0012 | — |
| 6811 | 215956_at | 0.001401 | — |
| 6811 | 217524_x_at | 0.002053 | — |
| 6811 | 216197_at | 6.70E−04 | ATF7IP |
| 6811 | 235049_at | 1.72E−04 | ADCY1 |
| 6811 | 1555369_at | 7.45E−04 | BAGE |
| 6811 | 202901_x_at | 4.52E−04 | CTSS |
| 6811 | 215377_at | 2.41E−05 | CTBP2 |
| 6811 | 1562772_a_at | 2.83E−04 | DAND5 |
| 6811 | 218362_s_at | 8.80E−04 | DIS3 |
| 6811 | 211129_x_at | 0.001024 | EDA |
| 6811 | 211130_x_at | 0.001024 | EDA |
| 6811 | 211127_x_at | 0.001024 | EDA |
| 6811 | 210525_x_at | 0.001019 | EFCAB11 |
| 6811 | 207822_at | 9.89E−04 | FGFR1 |
| 6811 | 232905_at | 0.001636 | GTF2H5 |
| 6811 | 1560396_at | 3.60E−04 | KLHL6 |
| 6811 | 223350_x_at | 2.21E−04 | LIN7C |
| 6811 | 220904_at | 4.72E−04 | LINC00574 |
| 6811 | 217456_x_at | 2.05E−04 | HLA-E |
| 6811 | 210869_s_at | 1.22E−04 | MCAM |
| 6811 | 1553688_at | 1.04E−04 | METTL6 |
| 6811 | 1553407_at | 4.91E−04 | MACF1 |
| 6811 | 215582_x_at | 2.41E−04 | MCM3AP |
| 6811 | 239268_at | 8.96E−04 | NDUFS1 |
| 6811 | 235432_at | 5.92E−04 | NPHP3 |
| 6811 | 1557172_x_at | 9.17E−04 | NEK8 |
| 6811 | 204185_x_at | 0.001113 | PPID |
| 6811 | 202122_s_at | 2.03E−04 | PLIN3 |
| 6811 | 205194_at | 1.47E−04 | PSPH |
| 6811 | 205233_s_at | 1.09E−04 | PAFAH2 |
| 6811 | 231809_x_at | 1.58E−04 | PDCD7 |
| 6811 | 1560715_at | 7.72E−04 | P4HA3 |
| 6811 | 232161_x_at | 5.42E−04 | PTPN4 |
| 6811 | 203735_x_at | 1.62E−04 | PPFIBP1 |
| 6811 | 217201_at | 2.27E−04 | RASAL2 |
| 6811 | 216247_at | 0.001225 | RPS20 /// SNORD54 |
| 6811 | 215856_at | 2.46E−04 | SIGLEC15 |
| 6811 | 218392_x_at | 2.05E−04 | SFXN1 |
| 6811 | 1560741_at | 6.90E−04 | SNRPN /// SNURF |
| 6811 | 224029_x_at | 1.37E−04 | SCN11A |
| 6811 | 1562415_a_at | 1.07E−04 | SPOCD1 |
| 6811 | 235526_at | 5.33E−04 | SOX6 |
| 6811 | 1554686_at | 2.43E−04 | STAU2 |
| 6811 | 215673_at | 2.15E−04 | TEF |
| 6811 | 219206_x_at | 8.04E−05 | TMBIM4 |
| 6811 | 222252_x_at | 1.32E−04 | UBQLN4 |
| 6811 | 221477_s_at | 6.52E−04 | LOC100129518 /// SOD2 |
| 6811 | 233840_at | 6.04E−04 | LOC100130950 |
| 6811 | 233775_x_at | 4.52E−04 | LOC100289333 |
| 6811 | 1562365_at | 0.001093 | LOC286177 |
| 6811 | 233210_at | 1.39E−04 | FLJ12120 |
| 6811 | 220020_at | 0.001426 | XPNPEP3 |
| 6811 | 231848_x_at | 6.03E−04 | ZNF207 |
| 6811 | 231988_x_at | 4.77E−04 | ZNF490 |
| 6811 | 219741_x_at | 5.50E−04 | ZNF552 |
| 6811 | 206180_x_at | 8.51E−04 | ZNF747 |
| 6811 | 219782_s_at | 5.82E−04 | ZNF771 |
| 6811 | 215826_x_at | 7.47E−04 | ZNF835 |
| 6838 | 243751_at | 7.50E−04 | CHD2 |
| 6859 | 1566485_at | 3.34E−04 | — |
| 6859 | 233994_at | 7.00E−04 | — |
| 6859 | 1566481_at | 0.001 | — |
| 6859 | 1563012_x_at | 0.001 | — |
| 6859 | 1561896_at | 0.001 | — |
| 6859 | 234788_x_at | 0.00201 | — |
| 6859 | 216601_at | 9.21E−04 | AOC4 |
| 6859 | 234981_x_at | 0.004 | CMBL |
| 6859 | 1553871_at | 8.00E−06 | CSNK1G2-AS1 |
| 6859 | 223487_x_at | 0.001 | GNB4 |
| 6859 | 244616_x_at | 2.76E−04 | MDM2 |
| 6859 | 204387_x_at | 0.002 | MRP63 |
| 6859 | 231437_at | 3.00E−04 | SLC35D2 |
| 6859 | 233399_x_at | 0.001 | TMED10P1 /// ZNF252 |
| 6859 | 214871_x_at | 0.001101 | LOC100287590 |
| 6859 | 1557472_a_at | 3.80E−04 | FLJ30838 |
| 6859 | 1562434_at | 1.00E−04 | UNK |
| 6878 | 238611_at | 0.001 | — |
| 6878 | 237549_at | 0.001 | — |
| 6878 | 236215_at | 0.001 | — |
| 6878 | 233817_at | 0.001 | — |
| 6878 | 233243_at | 0.001 | — |
| 6878 | 1569916_at | 0.001 | — |
| 6878 | 1569703_a_at | 0.001 | — |
| 6878 | 1569167_at | 0.001 | — |
| 6878 | 241207_at | 0.003 | — |
| 6878 | 217549_at | 0.003 | — |
| 6878 | 216110_x_at | 0.003 | — |
| 6878 | 242515_x_at | 0.001575 | AKIP1 |
| 6878 | 226036_x_at | 0.001 | CASP2 |
| 6878 | 224278_at | 0.001 | CYP4F30P |
| 6878 | 241923_x_at | 0.001 | NANS |
| 6878 | 206285_at | 6.00E−04 | NPHP1 |
| 6878 | 243643_x_at | 0.001 | SLC30A6 |
| 6878 | 1555259_at | 0.001 | ZAK |
| 6878 | 221085_at | 5.01E−04 | TNFSF15 |
| 6878 | 226891_at | 0.001 | XXYLT1 |
| 6935 | 216214_at | 5.00E−04 | — |
| 6943 | 1555510_at | 2.07E−04 | ZNF215 |
| 6953 | 232244_at | 2.00E−06 | KIAA1161 |
| 5803 | 209613_s_at | 0.002 | ADH1B |
| 5803 | 215046_at | 2.00E−04 | KANSL1L |
| 5803 | 206868_at | 2.00E−04 | STARD8 |
| 7004 | 1552311_a_at | 9.32E−04 | RAX2 |
| 7009 | 1558919_a_at | 3.00E−04 | SEC23IP |
| 7020 | 227040_at | 3.00E−16 | NHLRC3 |
| 7033 | 216739_at | 3.00E−04 | — |
| 7153 | 220583_at | 5.02E−04 | — |
| 7153 | 213759_at | 0.001 | ARL4C |
| 7153 | 229400_at | 0.001 | HOXD10 |
| 7153 | 218418_s_at | 0.001 | KANK2 |
| 7153 | 230863_at | 0.001 | LRP2 |
| 7153 | 1563458_at | 0.001 | PARVA |
| 7153 | 220025_at | 0.001 | TBR1 |
| 7153 | 1559756_at | 0.001 | DKFZp667F0711 |
| 5607 | 206825_at | 7.00E−04 | OXTR |
| 7212 | 241836_x_at | 0.00265 | CEP97 |
| 7257 | 233310_at | 5.00E−05 | — |
| 7267 | 220296_at | 8.00E−06 | — |
| 7300 | 210769_at | 0.003 | CNGB1 |
| 7300 | 1553389_at | 5.71E−04 | NPHP3 |
| 5837 | 1558976_x_at | 3.28E−04 | FAM100A |
| 5837 | 1558975_at | 3.28E−04 | FAM100A |
| 7313 | 213388_at | 0.0021 | LOC728802 /// PDE4DIP |
| 5839 | 222929_at | 3.00E−04 | FAM160B2 |
| 5839 | 222928_s_at | 3.00E−04 | FAM160B2 |
| 5839 | 1556178_x_at | 7.53E−05 | TAF8 |
| 5839 | 1559180_at | 0.001 | LOC100131860 |
| 7331 | 215200_x_at | 3.55E−04 | — |
| 7331 | 220252_x_at | 3.31E−04 | CXorf21 |
| 7331 | 235327_x_at | 0.001418 | UBXN2A |
| 5840 | 1562076_at | 3.60E−04 | — |
| 5840 | 1569912_at | 4.00E−04 | — |
| 5840 | 212886_at | 1.24E−04 | CCDC69 |
| 5840 | 215308_at | 0.001 | XRCC6 |
| 7362 | 232251_at | 2.00E−05 | NUDT16P1 |
| 7397 | 205101_at | 0.0015 | CIITA |
| 7421 | 1559843_s_at | 4.50E−05 | — |
| 7421 | 206091_at | 4.50E−05 | MATN3 |
| 7453 | 236921_at | 8.00E−05 | — |
| 7461 | 1564674_a_at | 9.35E−05 | CDC20B |
| 7461 | 240111_at | 0.0015 | RHOBTB3 |
| 7468 | 1564905_at | 2.00E−05 | — |
| 7468 | 215645_at | 0.0016 | FLCN |
| 7468 | 233812_at | 9.00E−04 | LINC00028 |
| 7468 | 215066_at | 0.001667 | PTPRF |
| 5856 | 215219_at | 1.00E−06 | DOPEY2 |
| 7481 | 1552677_a_at | 0.002 | DIP2A |
| 7481 | 1561482_at | 0.002 | LOC100133308 |
| 7536 | 1562644_at | 3.36E−04 | MTHFD2L |
| 7542 | 216151_at | 1.60E−04 | — |
| 7542 | 1569231_x_at | 1.60E−04 | — |
| 7542 | 1569230_at | 1.60E−04 | — |
| 7542 | 244838_at | 3.00E−04 | — |
| 7542 | 216613_at | 3.00E−04 | — |
| 7542 | 210272_at | 5.25E−04 | CYP2B7P1 |
| 7542 | 215281_x_at | 6.01E−04 | POGZ |
| 7542 | 243361_at | 3.00E−04 | SREK1 |
| 7550 | 1560576_at | 0.003 | — |
| 7550 | 214354_x_at | 0.001072 | SFTPB |
| 7564 | 1558887_at | 6.00E−05 | ZNF321P /// ZNF816 /// ZNF816-ZNF321P |
| 7565 | 1562579_at | 2.23E−05 | — |
| 7565 | 1566597_at | 1.36E−04 | — |
| 7565 | 233440_at | 1.72E−04 | — |
| 7565 | 205800_at | 8.00E−04 | — |
| 7565 | 1570432_at | 9.78E−04 | — |
| 7565 | 210334_x_at | 4.00E−08 | BIRC5 |
| 7565 | 223477_s_at | 2.99E−04 | C12orf65 |
| 7565 | 231859_at | 6.44E−05 | C14orf132 |
| 7565 | 243910_x_at | 1.42E−04 | CAND1 |
| 7565 | 222109_at | 2.50E−04 | GNL3L |
| 7565 | 220720_x_at | 3.53E−04 | MZT2B |
| 7565 | 1560145_at | 1.55E−05 | MKLN1 |
| 7565 | 207249_s_at | 2.28E−06 | SLC28A2 |
| 7565 | 1557275_a_at | 1.01E−04 | TLCD2 |
| 7565 | 1559289_at | 1.16E−04 | TADA1 |
| 7565 | 1569823_at | 0.001126 | LOC440346 |
| 7565 | 215625_at | 3.51E−06 | LOC644450 |
| 7565 | 208087_s_at | 4.00E−07 | ZBP1 |
| 7565 | 1552947_x_at | 1.92E−04 | ZNF114 |
| 7565 | 1552946_at | 1.92E−04 | ZNF114 |
| 7567 | 216155_at | 5.40E−04 | — |
| 7567 | 215597_x_at | 7.28E−04 | — |
| 7567 | 232991_at | 8.48E−04 | — |
| 7567 | 222207_x_at | 9.50E−04 | — |
| 7567 | 238829_at | 9.51E−04 | — |
| 7567 | 1569784_at | 0.001025 | — |
| 7567 | 1555617_x_at | 0.001124 | — |
| 7567 | 1555616_at | 0.001124 | — |
| 7567 | 233358_at | 0.001321 | — |
| 7567 | 215837_x_at | 0.001385 | — |
| 7567 | 242223_at | 0.003 | — |
| 7567 | 234148_at | 0.004 | — |
| 7567 | 221927_s_at | 7.66E−04 | ABHD11 |
| 7567 | 215135_at | 9.63E−04 | DNPEP |
| 7567 | 210858_x_at | 6.43E−04 | ATM |
| 7567 | 216875_x_at | 0.001183 | HAB1 |
| 7567 | 232885_at | 0.001251 | BBIP1 |
| 7567 | 206100_at | 0.004 | CPM |
| 7567 | 1559583_at | 0.001026 | CD276 |
| 7567 | 233693_at | 0.002075 | C1orf201 |
| 7567 | 242324_x_at | 7.92E−04 | CCBE1 |
| 7567 | 222104_x_at | 0.0022 | GTF2H3 |
| 7567 | 215202_at | 7.62E−04 | GUSBP11 |
| 7567 | 210224_at | 0.002001 | MR1 |
| 7567 | 215162_at | 0.001089 | RALGAPA1 |
| 7567 | 215208_x_at | 7.57E−04 | RPL35A |
| 7567 | 206995_x_at | 5.00E−04 | SCARF1 |
| 7567 | 222183_x_at | 0.001677 | SNW1 |
| 7567 | 204362_at | 0.004 | SKAP2 |
| 7567 | 203227_s_at | 0.00184 | TSPAN31 |
| 7567 | 203672_x_at | 0.00114 | TPMT |
| 7567 | 222267_at | 5.68E−04 | TMEM209 |
| 7567 | 224493_x_at | 0.001147 | TMEM241 |
| 7567 | 201671_x_at | 0.001556 | USP14 |
| 7567 | 1558527_at | 0.001055 | LOC100132707 |
| 7567 | 233992_x_at | 0.0014 | ZNF445 |
| 7567 | 1553022_at | 0.002007 | ZIM3 |
| 5865 | 1569761_x_at | 4.56E−04 | — |
| 5865 | 1569760_at | 4.56E−04 | — |
| 5865 | 240971_x_at | 6.90E−04 | — |
| 5865 | 1556814_a_at | 0.002333 | — |
| 5865 | 215803_at | 9.77E−04 | CXorf57 |
| 5865 | 215168_at | 0.001333 | TIMM17A |
| 5865 | 215978_x_at | 0.00184 | ZNF721 |
| 10016 | 211305_x_at | 0.001068 | FCAR |
| 10019 | 208162_s_at | 7.59E−04 | — |
| 10019 | 220809_at | 0.001 | — |
| 7602 | 234915_s_at | 0.004 | DENR |
| 7645 | 215995_x_at | 8.59E−04 | — |
| 7665 | 1561600_at | 2.00E−05 | — |
| 7665 | 220901_at | 7.00E−06 | GPR157 |
| 7665 | 215599_at | 1.00E−09 | GUSBP3 /// GUSBP9 |
| 7678 | 216733_s_at | 3.00E−14 | GATM |
| 7680 | 1558449_at | 2.00E−05 | — |
| 7680 | 212019_at | 8.00E−05 | RSL1D1 |
| 7680 | 219956_at | 2.53E−04 | GALNT6 |
| 7752 | 223679_at | 3.00E−04 | CTNNB1 |
| 7767 | 1562501_at | 3.00E−08 | LOC255177 |
| 7802 | 215385_at | 1.00E−05 | — |
| 7802 | 1562863_at | 3.00E−04 | — |
| 7802 | 243207_at | 0.0011 | — |
| 7802 | 222328_x_at | 0.001202 | — |
| 7802 | 233041_x_at | 0.001302 | — |
| 7802 | 232347_x_at | 0.001367 | — |
| 7802 | 234020_x_at | 0.00155 | — |
| 7802 | 1559229_at | 0.001852 | — |
| 7802 | 1565976_at | 0.002333 | — |
| 7802 | 207470_at | 0.003 | — |
| 7802 | 206924_at | 0.002 | IL11 |
| 7802 | 232457_at | 0.001483 | LIMCH1 |
| 7802 | 216466_at | 0.001 | NAV3 |
| 7802 | 1565786_x_at | 0.001077 | FLJ45482 |
| 7808 | 220387_s_at | 3.00E−04 | HHLA3 |
| 7808 | 234703_at | 3.00E−04 | HHLA3 |
| 7808 | 234665_x_at | 3.00E−04 | HHLA3 |
| 7816 | 1566129_at | 0.001054 | LIMS1 |
| 7839 | 235084_x_at | 4.00E−05 | TRIM38 |
| 7839 | 228353_x_at | 0.002 | UBASH3B |
| 7848 | 226913_s_at | 0.0015 | SOX8 |
| 7864 | 218661_at | 1.00E−09 | NAA60 |
| 7864 | 45526_g_at | 8.00E−06 | NAA60 |
| 7865 | 211412_at | 0.001039 | PADI4 |
| 7894 | 216132_at | 1.02E−04 | — |
| 7896 | 221501_x_at | 4.00E−10 | LOC100288332 /// LOC642778 /// LOC642799 /// PKD1P1 |
| 7897 | 241524_at | 2.00E−04 | — |
| 7897 | 1556778_at | 2.00E−04 | — |
| 7899 | 1560238_at | 0.001 | LOC100506930 |
| 7908 | 214035_x_at | 2.00E−10 | LOC399491 |
| 7908 | 204538_x_at | 2.00E−07 | NPIP |
| 7908 | 214870_x_at | 6.00E−04 | LOC100288332 /// LOC100506193 /// LOC642778 /// LOC642799 /// NPIP /// |
| 7916 | 240569_at | 5.45E−04 | — |
| 7933 | 234274_at | 4.30E−04 | — |
| 7936 | 1565788_at | 2.09E−04 | — |
| 7936 | 1554723_x_at | 0.002 | — |
| 7936 | 219384_s_at | 4.00E−05 | ADAT1 |
| 7936 | 1564307_a_at | 2.38E−04 | A2ML1 |
| 7936 | 206795_at | 8.00E−05 | F2RL2 |
| 7936 | 217535_at | 5.73E−04 | FAM49B |
| 7936 | 217534_at | 5.73E−04 | FAM49B |
| 7936 | 1569006_at | 2.21E−04 | LOC284379 |
| 7936 | 229296_at | 2.08E−04 | LOC100506119 |
| 7938 | 1559497_at | 8.00E−04 | — |
| 10025 | 239231_at | 8.00E−04 | — |
| 7964 | 240892_at | 8.00E−04 | — |
| 7964 | 234447_at | 0.003 | — |
| 7964 | 232753_at | 0.003 | ZNF346 |
| 7983 | 635_s_at | 0.003 | PPP2R5B |
| 7984 | 1566266_at | 2.00E−04 | — |
| 7984 | 1566265_at | 2.00E−04 | — |
| 7984 | 211369_at | 2.72E−04 | — |
| 7984 | 1557758_at | 3.40E−04 | — |
| 7984 | 216612_x_at | 4.01E−04 | — |
| 7984 | 219706_at | 1.75E−04 | AP5S1 |
| 7984 | 210873_x_at | 9.25E−05 | APOBEC3A |
| 7984 | 1555572_at | 4.69E−04 | CA6 |
| 7984 | 219621_at | 6.20E−04 | CLSPN |
| 7984 | 223255_at | 1.00E−04 | G2E3 |
| 7984 | 1570200_at | 2.60E−04 | HELB |
| 7984 | 216713_at | 5.00E−07 | KRIT1 |
| 7984 | 1559731_x_at | 6.58E−04 | MACROD1 |
| 7984 | 241395_at | 2.73E−04 | NIT1 |
| 7984 | 209422_at | 2.00E−04 | PHF20 |
| 7984 | 235218_x_at | 2.33E−04 | TIIAP6 |
| 7984 | 1569004_at | 1.54E−04 | LOC100505812 |
| 7991 | 1569551_at | 0.00178 | — |
| 7992 | 222272_x_at | 3.12E−04 | SCIN |
| 7994 | 223736_at | 0.002986 | IFT81 |
| 8002 | 233702_x_at | 4.82E−04 | — |
| 8002 | 234214_at | 8.88E−04 | — |
| 8002 | 211717_at | 0.003 | ANKRD40 |
| 8002 | 1562460_at | 0.00165 | CNDP2 |
| 8002 | 214372_x_at | 9.38E−04 | ERN2 |
| 8002 | 225164_s_at | 0.001733 | EIF2AK4 |
| 8002 | 222036_s_at | 0.003 | MCM4 |
| 8002 | 232158_x_at | 6.24E−04 | NIPAL1 |
| 8002 | 225335_at | 0.003 | ZNF496 |
| 8015 | 1562771_at | 1.69E−05 | — |
| 8015 | 215846_at | 2.51E−05 | — |
| 8015 | 239735_at | 2.51E−05 | — |
| 8015 | 221176_x_at | 3.84E−05 | — |
| 8015 | 216051_x_at | 5.26E−05 | — |
| 8015 | 240529_at | 1.00E−04 | — |
| 8015 | 1560129_at | 1.41E−04 | — |
| 8015 | 215507_x_at | 1.86E−04 | — |
| 8015 | 210679_x_at | 1.87E−04 | — |
| 8015 | 242080_at | 2.00E−04 | — |
| 8015 | 234046_at | 2.00E−04 | — |
| 8015 | 216745_x_at | 2.13E−04 | — |
| 8015 | 1570198_x_at | 2.75E−04 | — |
| 8015 | 234814_at | 2.75E−04 | — |
| 8015 | 216123_x_at | 2.97E−04 | — |
| 8015 | 1562947_x_at | 3.52E−04 | — |
| 8015 | 1562946_at | 3.52E−04 | — |
| 8015 | 215494_at | 3.75E−04 | — |
| 8015 | 1557325_at | 4.33E−04 | — |
| 8015 | 215609_at | 5.10E−04 | — |
| 8015 | 216789_at | 5.28E−04 | — |
| 8015 | 215314_at | 5.33E−04 | — |
| 8015 | 1557644_at | 5.37E−04 | — |
| 8015 | 235123_at | 5.38E−04 | — |
| 8015 | 222214_at | 5.50E−04 | — |
| 8015 | 233526_at | 5.51E−04 | — |
| 8015 | 1564336_at | 5.70E−04 | — |
| 8015 | 217679_x_at | 5.75E−04 | — |
| 8015 | 221071_at | 5.76E−04 | — |
| 8015 | 233721_x_at | 5.80E−04 | — |
| 8015 | 217706_at | 6.00E−04 | — |
| 8015 | 217164_at | 6.00E−04 | — |
| 8015 | 1559753_at | 6.00E−04 | — |
| 8015 | 1564148_at | 6.02E−04 | — |
| 8015 | 210920_x_at | 6.52E−04 | — |
| 8015 | 233218_at | 6.61E−04 | — |
| 8015 | 238672_at | 6.64E−04 | — |
| 8015 | 215742_at | 6.74E−04 | — |
| 8015 | 243103_at | 6.75E−04 | — |
| 8015 | 232962_x_at | 7.43E−04 | — |
| 8015 | 233519_at | 9.33E−04 | — |
| 8015 | 232714_at | 9.60E−04 | — |
| 8015 | 243660_at | 0.002 | — |
| 8015 | 231317_at | 0.0021 | — |
| 8015 | 207728_at | 7.33E−05 | ATF7IP |
| 8015 | 233333_x_at | 8.30E−04 | AVIL |
| 8015 | 1555435_at | 6.00E−04 | AFF4 |
| 8015 | 207133_x_at | 5.07E−04 | ALPK1 |
| 8015 | 209425_at | 0.002 | AMACR /// C1QTNF3 /// C1QTNF3-AMACR |
| 8015 | 223677_at | 4.50E−04 | ATG10 |
| 8015 | 1562391_at | 2.90E−04 | B3GALNT2 |
| 8015 | 221703_at | 6.32E−04 | BRIP1 |
| 8015 | 209508_x_at | 2.51E−05 | CFLAR |
| 8015 | 211316_x_at | 3.50E−04 | CFLAR |
| 8015 | 209790_s_at | 0.00125 | CASP6 |
| 8015 | 201974_s_at | 6.00E−04 | CCZ1 |
| 8015 | 205264_at | 4.45E−04 | CD3EAP |
| 8015 | 244352_at | 1.84E−05 | CD84 |
| 8015 | 1558557_at | 6.00E−04 | C16orf62 |
| 8015 | 1564315_at | 4.78E−04 | C8orf49 |
| 8015 | 1559003_a_at | 6.00E−04 | CCDC163P |
| 8015 | 211325_x_at | 0.001066 | DSTNP2 |
| 8015 | 1555404_a_at | 0.002 | DUOXA1 |
| 8015 | 215173_at | 8.61E−04 | DNAAF1 |
| 8015 | 220725_x_at | 0.001407 | DNAH3 |
| 8015 | 1559044_at | 2.10E−04 | EXOSC1 |
| 8015 | 226062_x_at | 4.66E−04 | FAM63A |
| 8015 | 232350_x_at | 2.67E−04 | GPR161 |
| 8015 | 234918_at | 9.14E−05 | GLTSCR2 |
| 8015 | 206952_at | 1.93E−04 | G6PC |
| 8015 | 223327_x_at | 3.03E−04 | AGSK1 /// LOC727751 /// LOC727849 |
| 8015 | 1557350_at | 0.002 | G3BP1 |
| 8015 | 1552318_at | 7.37E−04 | GIMAP1 |
| 8015 | 232043_at | 2.00E−04 | GNG7 |
| 8015 | 220071_x_at | 5.57E−04 | HAUS2 |
| 8015 | 236400_at | 2.00E−04 | IDH1-AS1 |
| 8015 | 1569033_at | 5.14E−04 | IGF2BP3 |
| 8015 | 1560172_at | 8.28E−04 | INTS10 |
| 8015 | 207194_s_at | 0.0021 | ICAM4 |
| 8015 | 1552584_at | 0.0015 | IL12RB1 |
| 8015 | 209245_s_at | 5.61E−04 | KIF1C |
| 8015 | 244276_at | 5.02E−05 | KLB |
| 8015 | 215322_at | 1.70E−05 | LONRF1 |
| 8015 | 210711_at | 0.00181 | LINC00260 |
| 8015 | 231840_x_at | 2.52E−05 | LYRM7 |
| 8015 | 202793_at | 7.42E−04 | LPCAT3 |
| 8015 | 208306_x_at | 1.09E−04 | HLA-DRB1 /// LOC100507709 /// LOC100507714 |
| 8015 | 221697_at | 4.63E−05 | MAP1LC3C |
| 8015 | 1569348_at | 8.72E−04 | MIR4500HG /// TPTEP1 |
| 8015 | 216206_x_at | 1.69E−05 | MAP2K7 |
| 8015 | 217295_at | 1.68E−05 | MUC8 |
| 8015 | 211445_x_at | 2.91E−04 | NACAP1 |
| 8015 | 1557737_s_at | 1.67E−05 | NKTR |
| 8015 | 207631_at | 1.03E−04 | NBR2 |
| 8015 | 214123_s_at | 1.00E−04 | NOP14-AS1 |
| 8015 | 222255_at | 0.002035 | PRX |
| 8015 | 244689_at | 9.34E−04 | PPARA |
| 8015 | 206792_x_at | 5.30E−04 | PDE4C |
| 8015 | 210304_at | 3.92E−04 | PDE6B |
| 8015 | 1552343_s_at | 1.70E−04 | PDE7A |
| 8015 | 231812_x_at | 1.33E−04 | PHAX |
| 8015 | 220714_at | 6.67E−05 | PRDM14 |
| 8015 | 222106_at | 3.38E−04 | PRND |
| 8015 | 207291_at | 2.70E−05 | PRRG4 |
| 8015 | 1569748_at | 0.001411 | PRKCZ |
| 8015 | 231830_x_at | 7.34E−04 | RAB11FIP1 |
| 8015 | 212706_at | 0.002063 | RASA4 /// RASA4B |
| 8015 | 1563014_at | 6.00E−04 | RPS15 |
| 8015 | 1557981_at | 1.00E−04 | RPS9 |
| 8015 | 207735_at | 1.45E−04 | RNF125 |
| 8015 | 207889_at | 0.002 | SARDH |
| 8015 | 232421_at | 1.00E−04 | SCARB1 |
| 8015 | 222169_x_at | 5.60E−04 | SH2D3A |
| 8015 | 1552910_at | 4.00E−04 | SIGLEC11 |
| 8015 | 229209_at | 0.001052 | SNHG10 |
| 8015 | 1568922_at | 4.00E−04 | SLC24A4 |
| 8015 | 1560062_at | 0.001067 | SLC29A2 |
| 8015 | 205482_x_at | 7.63E−04 | SNX15 |
| 8015 | 214791_at | 1.26E−05 | SP140L |
| 8015 | 1555614_at | 6.00E−04 | SUGT1P1 |
| 8015 | 1569073_x_at | 2.70E−04 | SMARCA4 |
| 8015 | 215122_at | 8.02E−04 | TBX6 |
| 8015 | 1566901_at | 0.001067 | TGIF1 |
| 8015 | 1562490_at | 7.53E−04 | THEM5 |
| 8015 | 1569392_at | 6.33E−06 | TECR |
| 8015 | 226483_at | 7.92E−04 | TMEM68 |
| 8015 | 215844_at | 1.69E−05 | TNPO2 |
| 8015 | 1554182_at | 1.10E−04 | TRIM73 /// TRIM74 |
| 8015 | 216439_at | 4.14E−04 | TNK2 |
| 8015 | 211008_s_at | 0.001293 | UBE2I |
| 8015 | 1552834_at | 2.03E−04 | B3GNT6 |
| 8015 | 214809_at | 3.33E−04 | LOC100294145 |
| 8015 | 232804_at | 2.63E−04 | LOC100506385 |
| 8015 | 1564232_at | 5.48E−04 | LOC100506453 /// LOC441528 |
| 8015 | 235014_at | 3.50E−05 | LOC147727 |
| 8015 | 1563571_at | 3.27E−04 | LOC285463 |
| 8015 | 220352_x_at | 9.71E−04 | FLJ42627 |
| 8016 | 215840_at | 5.01E−04 | DNAH2 |
| 8016 | 217497_at | 5.50E−04 | TYMP |
| 8016 | 235317_at | 1.00E−05 | LOC284454 |
| 8016 | 1555847_a_at | 1.00E−05 | LOC284454 |
| 8017 | 234953_x_at | 3.00E−13 | ZNF19 |
| 8034 | 208319_s_at | 6.00E−04 | RBM3 |
| 8057 | 1565868_at | 0.005 | CD44 |
| 8097 | 238360_s_at | 0.003 | LOC100505576 |
| 8105 | 217033_x_at | 0.003 | NTRK3 |
| 8142 | 216118_at | 0.002 | — |
| 8147 | 220578_at | 0.002 | ADAMTSL4 |
| 8147 | 206829_x_at | 0.001 | ZNF430 |
| 8156 | 216290_x_at | 3.25E−04 | — |
| 8156 | 1569952_x_at | 3.61E−04 | — |
| 8156 | 242740_at | 3.96E−04 | — |
| 8156 | 1563505_at | 4.12E−04 | DUSP16 |
| 8156 | 212394_at | 0.001401 | EMC1 |
| 8156 | 208247_at | 0.001433 | ERC2-IT1 |
| 8156 | 217618_x_at | 4.33E−04 | HUS1 |
| 8156 | 207433_at | 8.03E−04 | IL10 |
| 8156 | 208262_x_at | 9.11E−04 | MEFV |
| 8156 | 215123_at | 0.001758 | 61E3.4 /// LOC100132247 /// LOC100652992 /// LOC613037 /// LOC728888 /// |
| 8156 | 1570210_x_at | 8.20E−04 | PPP6R2 |
| 8156 | 203971_at | 4.18E−04 | SLC31A1 |
| 8156 | 206293_at | 7.96E−04 | SULT2A1 |
| 8156 | 203568_s_at | 0.00101 | TRIM38 |
| 8156 | 206916_x_at | 5.12E−04 | TAT |
| 8156 | 214413_at | 5.63E−04 | TAT |
| 8156 | 207499_x_at | 3.14E−04 | UNC45A |
| 8156 | 1564639_at | 0.00225 | LOC100291323 |
| 8165 | 240620_at | 7.00E−04 | — |
| 8165 | 223290_at | 7.00E−04 | PDXP /// SH3BP1 |
| 5925 | 1566202_at | 2.00E−05 | — |
| 5925 | 220696_at | 7.00E−04 | — |
| 5925 | 233776_at | 0.003 | — |
| 5925 | 1569728_at | 0.003 | LINC00423 |
| 5925 | 201695_s_at | 7.00E−04 | PNP |
| 5925 | 231961_at | 0.00185 | RBPMS |
| 5925 | 242358_at | 7.00E−04 | LOC100506451 |
| 8179 | 217098_s_at | 0.003 | ZSCAN12 |
| 8179 | 1558622_a_at | 2.00E−04 | ZNF548 |
| 8179 | 1568900_a_at | 0.003 | ZNF568 |
| 8179 | 217627_at | 0.003 | ZNF573 |
| 8179 | 1559789_a_at | 8.00E−04 | ZNF781 |
| 5927 | 1561879_at | 2.50E−06 | — |
| 5927 | 1560678_at | 5.31E−06 | — |
| 5927 | 215907_at | 1.47E−05 | — |
| 5927 | 1569478_s_at | 4.40E−05 | — |
| 5927 | 1561704_at | 6.40E−05 | — |
| 5927 | 236839_at | 8.28E−05 | — |
| 5927 | 232363_at | 1.18E−04 | — |
| 5927 | 233004_x_at | 1.55E−04 | — |
| 5927 | 1555718_x_at | 1.91E−04 | — |
| 5927 | 1555717_at | 1.91E−04 | — |
| 5927 | 215553_x_at | 2.13E−04 | — |
| 5927 | 1561924_at | 2.50E−04 | — |
| 5927 | 1566887_x_at | 2.53E−04 | — |
| 5927 | 216187_x_at | 3.45E−04 | — |
| 5927 | 231212_x_at | 4.69E−04 | — |
| 5927 | 241094_at | 6.59E−04 | — |
| 5927 | 215373_x_at | 7.29E−04 | — |
| 5927 | 207436_x_at | 8.08E−04 | — |
| 5927 | 222359_x_at | 1.43E−04 | KDSR |
| 5927 | 241354_at | 5.04E−05 | ASMTL-AS1 |
| 5927 | 207288_at | 4.25E−04 | ASMTL-AS1 |
| 5927 | 204920_at | 0.0019 | CPS1 |
| 5927 | 225836_s_at | 4.46E−04 | C12orf32 |
| 5927 | 1554176_a_at | 2.29E−04 | C3orf33 |
| 5927 | 1555095_at | 3.37E−04 | C6orf123 |
| 5927 | 1569293_x_at | 2.65E−04 | CROCCP2 |
| 5927 | 1569291_at | 2.65E−04 | CROCCP2 |
| 5927 | 220774_at | 1.00E−06 | DYM |
| 5927 | 222194_at | 3.00E−04 | FAM66D |
| 5927 | 219815_at | 1.00E−06 | GAL3ST4 |
| 5927 | 233193_x_at | 1.17E−04 | INTS4 |
| 5927 | 1553243_at | 0.001302 | ITIH5 |
| 5927 | 216958_s_at | 4.00E−06 | IVD |
| 5927 | 230567_at | 1.01E−04 | KIAA1430 |
| 5927 | 211452_x_at | 2.80E−04 | LRRFIP1 |
| 5927 | 217810_x_at | 2.13E−04 | LARS |
| 5927 | 222762_x_at | 5.02E−04 | LIMD1 |
| 5927 | 220945_x_at | 4.76E−04 | MANSC1 |
| 5927 | 234976_x_at | 1.00E−06 | MTHFD2 |
| 5927 | 214650_x_at | 5.76E−04 | MOG |
| 5927 | 229220_x_at | 6.67E−04 | NOM1 |
| 5927 | 215179_x_at | 1.46E−04 | PGF |
| 5927 | 207109_at | 7.23E−04 | POU2F3 |
| 5927 | 1554376_s_at | 0.002525 | PTPLA |
| 5927 | 223927_at | 2.66E−04 | PCDHB9 |
| 5927 | 1565800_x_at | 3.35E−04 | RAB3IP |
| 5927 | 1565799_at | 3.35E−04 | RAB3IP |
| 5927 | 1569396_at | 2.13E−04 | RAB40C |
| 5927 | 233872_x_at | 4.78E−05 | ARHGAP5 |
| 5927 | 1564377_at | 3.68E−07 | SHANK2 |
| 5927 | 1552497_a_at | 7.67E−04 | SLAMF6 |
| 5927 | 220182_at | 1.00E−06 | SLC25A23 |
| 5927 | 220181_x_at | 6.14E−04 | SLC30A5 |
| 5927 | 243594_x_at | 0.001 | SPIRE2 |
| 5927 | 222907_x_at | 5.66E−04 | TMEM50B |
| 5927 | 1566152_a_at | 5.60E−05 | LOC100507106 |
| 5927 | 1566734_at | 1.77E−04 | LOC283454 |
| 5927 | 1558723_at | 2.84E−04 | LOC284014 |
| 5927 | 232455_x_at | 0.001002 | LOC340085 |
| 5927 | 1561099_at | 2.91E−05 | FLJ32756 |
| 5927 | 224185_at | 3.41E−04 | WRAP53 |
| 5927 | 205519_at | 8.98E−04 | WDR76 |
| 5927 | 239243_at | 1.00E−06 | ZNF638 |
| 5927 | 1561038_at | 5.20E−07 | ZNF81 |
| 8195 | 1566098_at | 4.47E−04 | — |
| 8195 | 1554839_at | 6.69E−05 | CIDECP |
| 8195 | 231994_at | 9.01E−07 | CHDH |
| 8195 | 1559591_s_at | 1.98E−05 | CHDH |
| 8195 | 207516_at | 4.00E−05 | CHRNB4 |
| 8195 | 216459_x_at | 9.00E−04 | DDR1-AS1 |
| 8195 | 242945_at | 5.00E−07 | FAM20A |
| 8195 | 210429_at | 5.00E−04 | RHD |
| 8195 | 233360_at | 0.001268 | UBE2I |
| 8195 | 1564021_at | 8.18E−04 | LOC100130456 |
| 8195 | 1569078_at | 1.05E−07 | LOC100294362 |
| 8198 | 1563303_at | 4.80E−05 | — |
| 8198 | 1561139_at | 2.67E−04 | — |
| 8198 | 215163_at | 4.23E−04 | — |
| 8198 | 243037_at | 0.001333 | — |
| 8198 | 1558577_at | 1.67E−04 | LOC148709 |
| 8198 | 219857_at | 0.0011 | PLEKHS1 |
| 8198 | 215359_x_at | 7.00E−06 | ZNF44 |
| 10041 | 1557897_at | 3.00E−04 | — |
| 10041 | 1562384_at | 4.00E−04 | — |
| 10041 | 241848_x_at | 6.55E−04 | — |
| 10041 | 1570491_at | 0.0011 | — |
| 10041 | 1569213_at | 7.45E−04 | LOC400891 |
| 10041 | 234098_at | 0.001375 | SOBP |
| 8240 | 234880_x_at | 4.00E−04 | KRTAP1-3 |
| 8246 | 223647_x_at | 0.0021 | HSCB |
| 8248 | 1557864_x_at | 3.04E−04 | — |
| 8251 | 234517_at | 2.78E−04 | — |
| 8251 | 1557135_at | 3.70E−04 | — |
| 8251 | 1566696_at | 4.39E−04 | — |
| 8251 | 208246_x_at | 4.65E−04 | — |
| 8251 | 1570295_at | 5.24E−04 | — |
| 8251 | 1561741_at | 7.10E−04 | — |
| 8251 | 244711_at | 0.001505 | — |
| 8251 | 226544_x_at | 5.89E−04 | EEF1E1-MUTED /// MUTED |
| 8251 | 1556436_at | 3.03E−04 | EXTL3-AS1 |
| 8251 | 216502_at | 5.70E−04 | ISG20L2 |
| 8251 | 202903_at | 0.0015 | LSM5 |
| 8251 | 206426_at | 0.001159 | MLANA |
| 8251 | 217677_at | 0.00144 | PLEKHA2 |
| 8251 | 208411_x_at | 2.32E−04 | PPEF2 |
| 8251 | 1569502_s_at | 8.46E−04 | TP73-AS1 |
| 8251 | 206169_x_at | 3.52E−04 | ZC3H7B |
| 8251 | 1558586_at | 5.72E−04 | ZNF33B |
| 8251 | 1553901_x_at | 0.001428 | ZNF486 |
| 8251 | 1552770_s_at | 3.04E−04 | ZNF563 |
| 8269 | 234501_x_at | 1.33E−04 | — |
| 8269 | 233783_at | 1.76E−04 | — |
| 8269 | 242658_at | 4.00E−04 | — |
| 8303 | 236438_at | 0.001 | — |
| 8303 | 208014_x_at | 0.001445 | — |
| 8303 | 1563080_at | 0.002001 | — |
| 8303 | 1566703_at | 0.0022 | — |
| 8303 | 244665_at | 0.0025 | — |
| 8303 | 213026_at | 0.002004 | ATG12 |
| 8303 | 240366_at | 0.001 | LHFPL3-AS1 |
| 8303 | 210556_at | 6.32E−04 | NFATC3 |
| 8303 | 1558738_at | 0.001401 | NOL3 |
| 8306 | 1557486_at | 3.52E−06 | — |
| 8306 | 243931_at | 4.50E−06 | — |
| 8306 | 208238_x_at | 1.10E−05 | — |
| 8306 | 233037_at | 5.00E−05 | — |
| 8306 | 210598_at | 1.03E−04 | — |
| 8306 | 1569712_at | 1.69E−04 | — |
| 8306 | 242731_x_at | 1.95E−04 | — |
| 8306 | 232626_at | 2.36E−04 | — |
| 8306 | 1559652_at | 2.59E−04 | — |
| 8306 | 1559663_at | 3.00E−04 | — |
| 8306 | 1563461_at | 5.22E−04 | — |
| 8306 | 243391_x_at | 5.40E−04 | — |
| 8306 | 1560792_at | 5.52E−04 | — |
| 8306 | 236153_at | 6.32E−04 | — |
| 8306 | 216771_at | 6.50E−04 | — |
| 8306 | 242413_at | 6.70E−04 | — |
| 8306 | 207730_x_at | 7.56E−04 | — |
| 8306 | 1570496_at | 0.00104 | — |
| 8306 | 205745_x_at | 5.00E−07 | ADAM17 |
| 8306 | 231858_x_at | 5.04E−04 | AP5B1 |
| 8306 | 232814_x_at | 0.00154 | APOPT1 |
| 8306 | 1554367_at | 2.00E−05 | CALHM1 |
| 8306 | 223942_x_at | 7.00E−06 | CHST5 |
| 8306 | 243403_x_at | 2.00E−05 | CPM |
| 8306 | 232650_at | 2.00E−05 | C12orf65 |
| 8306 | 220601_at | 5.81E−04 | C16orf70 |
| 8306 | 219678_x_at | 1.36E−04 | DCLRE1C |
| 8306 | 208963_x_at | 0.00154 | FADS1 /// MIR1908 |
| 8306 | 210608_s_at | 8.00E−05 | FUT2 |
| 8306 | 1556742_at | 2.00E−05 | GUSBP1 |
| 8306 | 211351_at | 8.00E−05 | KIF25-AS1 |
| 8306 | 206500_s_at | 0.001693 | MIS18BP1 |
| 8306 | 220411_x_at | 4.35E−05 | PODNL1 |
| 8306 | 211265_at | 6.93E−04 | PTGER3 |
| 8306 | 1560014_s_at | 3.52E−06 | PDXDC1 |
| 8306 | 1560013_at | 3.01E−04 | PDXDC1 |
| 8306 | 227888_at | 3.00E−04 | RRBP1 |
| 8306 | 238087_at | 0.001218 | RTCA |
| 8306 | 229334_at | 0.00104 | RUFY3 |
| 8306 | 1569938_at | 5.10E−04 | SIRT5 |
| 8306 | 1564911_at | 2.11E−04 | SNHG4 |
| 8306 | 232355_at | 0.001001 | SNORD114-3 |
| 8306 | 211855_s_at | 2.00E−05 | SLC25A14 |
| 8306 | 1557073_s_at | 0.00101 | TTBK2 |
| 8306 | 217625_x_at | 3.50E−04 | LOC100506190 |
| 8306 | 235617_x_at | 8.00E−06 | LOC100507537 |
| 8306 | 233013_x_at | 5.04E−04 | LOC220906 |
| 8306 | 1566760_at | 7.00E−06 | FLJ34208 |
| 8306 | 1554476_x_at | 7.00E−06 | ZNF808 |
| 8311 | 242826_at | 0.001 | — |
| 8311 | 1561276_at | 3.81E−04 | DOCK5 |
| 8318 | 1566106_at | 0.002 | — |
| 8318 | 230309_at | 3.36E−06 | BHMT2 |
| 8318 | 213275_x_at | 1.00E−05 | CTSB |
| 8318 | 211042_x_at | 0.002 | MCAM |
| 8318 | 219788_at | 0.002 | PILRA |
| 8318 | 218997_at | 3.10E−04 | POLR1E |
| 8318 | 1559169_at | 0.002 | LOC100507013 |
| 8319 | 215674_at | 1.50E−04 | — |
| 8319 | 1560563_at | 2.52E−04 | — |
| 8319 | 1564472_at | 5.45E−04 | — |
| 8319 | 234478_at | 5.45E−04 | — |
| 8319 | 216729_at | 0.001 | — |
| 8319 | 233622_x_at | 0.001 | — |
| 8319 | 1561918_at | 0.001 | — |
| 8319 | 239053_at | 6.46E−04 | CIAO1 |
| 8319 | 233741_at | 5.33E−04 | FTCD |
| 8319 | 1569503_at | 5.52E−04 | HEATR5B |
| 8319 | 232627_at | 3.39E−04 | HGS |
| 8319 | 1569980_x_at | 5.00E−04 | HKR1 |
| 8319 | 1569979_at | 5.00E−04 | HKR1 |
| 8319 | 1553484_at | 0.0025 | LINC00477 |
| 8319 | 221192_x_at | 0.004 | MFSD11 |
| 8319 | 215895_x_at | 0.001 | PLIN2 |
| 8319 | 207836_s_at | 9.00E−05 | RBPMS |
| 8319 | 207837_at | 9.00E−05 | RBPMS |
| 8319 | 1566191_at | 0.001 | SUZ12 |
| 8319 | 207554_x_at | 3.33E−04 | TBXA2R |
| 8319 | 220655_at | 1.45E−04 | TNIP3 |
| 8319 | 1552648_a_at | 9.50E−04 | TNFRSF10A |
| 8319 | 1562051_at | 0.001 | LIC284757 /// LOC729296 |
| 8324 | 240148_at | 1.00E−04 | — |
| 8324 | 240800_x_at | 5.00E−04 | — |
| 8324 | 1569738_at | 5.00E−04 | — |
| 8324 | 221184_at | 5.80E−04 | — |
| 8324 | 207953_at | 0.001001 | — |
| 8324 | 1556815_at | 0.0011 | — |
| 8324 | 241443_at | 0.001112 | — |
| 8324 | 233258_at | 0.00135 | — |
| 8324 | 204573_at | 0.002 | CROT |
| 8324 | 220575_at | 3.50E−04 | FAM106A |
| 8324 | 1553361_x_at | 0.002 | FBXL18 |
| 8324 | 1553359_at | 0.002 | FBXL18 |
| 8324 | 203607_at | 5.13E−04 | INPP5F |
| 8324 | 1558425_x_at | 0.002 | LINC00265 /// LOC100292676 /// LOC730376 |
| 8324 | 1564658_at | 2.90E−04 | NAT16 |
| 8324 | 239362_at | 5.00E−04 | NAPA-AS1 |
| 8324 | 205296_at | 8.26E−04 | RBL1 |
| 8324 | 202335_s_at | 7.50E−04 | UBE2B |
| 8324 | 1558148_x_at | 0.003 | FLJ90757 |
| 8330 | 1570105_at | 2.00E−04 | — |
| 17 | 230694_at | 1.00E−08 | SLC35E2B |
| 8366 | 1560347_at | 6.12E−04 | — |
| 8366 | 1566870_at | 9.33E−04 | — |
| 8366 | 233291_at | 0.00135 | — |
| 8366 | 231856_at | 0.002 | KIAA1244 |
| 8366 | 206451_at | 7.16E−04 | TBCCD1 |
| 19 | 1556951_at | 4.00E−04 | — |
| 19 | 235006_at | 7.00E−07 | CDKN2AIPNL |
| 19 | 221170_at | 0.005 | HRH4 |
| 19 | 201013_s_at | 0.005 | PAICS |
| 8378 | 203277_at | 4.00E−04 | DFFA |
| 8384 | 1558021_at | 4.00E−08 | RABEPK |
| 8416 | 213553_x_at | 0.003 | APOC1 |
| 8419 | 235999_at | 0.002 | — |
| 8419 | 206809_s_at | 1.00E−05 | HNRNPA3 /// HNRNPA3P1 |
| 8419 | 206808_at | 1.00E−05 | HNRNPA3P1 |
| 8419 | 218047_at | 0.002 | OSBPL9 |
| 8419 | 203544_s_at | 1.00E−05 | STAM |
| 8419 | 227233_at | 0.002 | TSPAN2 |
| 8419 | 238958_at | 0.002 | UBE2E1 |
| 8442 | 216691_at | 5.00E−06 | — |
| 8442 | 238738_at | 5.00E−06 | — |
| 8452 | 1559147_at | 2.00E−04 | — |
| 8462 | 1565604_at | 3.00E−04 | PWP2 |
| 8462 | 1554676_at | 4.63E−04 | SRGN |
| 8462 | 220826_at | 4.00E−04 | TCP10L |
| 8495 | 217650_x_at | 3.10E−04 | ST3GAL2 |
| 8534 | 1563638_at | 7.56E−04 | FAM18A |
| 8587 | 1561151_a_at | 8.00E−04 | — |
| 8594 | 243667_at | 1.00E−04 | — |
| 8594 | 233875_at | 3.50E−04 | — |
| 8594 | 215504_x_at | 3.50E−04 | — |
| 8594 | 212172_at | 8.70E−05 | AK2 |
| 8594 | 1559097_at | 5.50E−05 | C14orf64 |
| 8594 | 233122_at | 3.00E−05 | KRTCAP2 |
| 8594 | 219730_at | 6.71E−05 | MED18 |
| 8594 | 232648_at | 1.02E−04 | PSMA3 |
| 8594 | 242208_at | 3.00E−07 | ZNF37BP |
| 45 | 1554550_at | 0.001504 | KIAA1430 |
| 45 | 232579_at | 0.003 | LOC100134229 |
| 45 | 1556319_at | 0.003 | LOC283270 |
| 8664 | 207417_s_at | 5.00E−11 | ZNF177 /// ZNF559-ZNF177 |
| 8664 | 223714_at | 6.00E−07 | ZNF256 |
| 8664 | 235414_at | 3.00E−05 | ZNF383 |
| 8664 | 208081_s_at | 0.004 | ZNF442 |
| 8664 | 215315_at | 6.00E−07 | ZNF549 |
| 8678 | 229033_s_at | 4.00E−16 | MUM1 |
| 8680 | 242645_at | 3.50E−06 | — |
| 8680 | 1562962_at | 7.00E−06 | — |
| 8680 | 1570103_at | 3.00E−04 | — |
| 8680 | 1570205_at | 0.001 | — |
| 8680 | 244193_at | 0.003 | DNAJC22 |
| 8680 | 220974_x_at | 2.00E−05 | SFXN3 |
| 8686 | 233056_x_at | 0.00103 | DLGAP4 |
| 8687 | 215901_at | 0.0021 | ZNF81 |
| 8699 | 217708_x_at | 4.00E−05 | — |
| 8699 | 1560370_x_at | 1.01E−05 | ANKH |
| 8699 | 1560369_at | 1.01E−05 | ANKH |
| 8699 | 238723_at | 3.45E−05 | ATXN3 |
| 8699 | 219149_x_at | 0.00144 | DBR1 |
| 8699 | 222842_at | 0.002404 | EIF2C4 |
| 8699 | 1552664_at | 0.001505 | FLCN |
| 8699 | 233605_x_at | 5.53E−04 | IINRNPM |
| 8699 | 212594_at | 5.42E−06 | MIR4680 /// PDCD4 |
| 8699 | 1559127_x_at | 7.30E−04 | RRP12 |
| 8699 | 219125_s_at | 7.79E−04 | SLC50A1 |
| 8699 | 215383_x_at | 0.001513 | SPG21 |
| 8699 | 1569723_a_at | 2.00E−05 | SPIRE2 |
| 8699 | 204341_at | 5.05E−04 | TRIM16 |
| 8699 | 223109_at | 3.00E−04 | TRUB2 |
| 8699 | 1569378_at | 5.00E−05 | LOC100292680 |
| 8699 | 215467_x_at | 0.001605 | LOC647070 |
| 8699 | 204590_x_at | 1.65E−04 | VPS33A |
| 8699 | 214715_x_at | 8.76E−04 | ZNF160 |
| 8699 | 219765_at | 2.04E−04 | ZNF329 |
| 8699 | 206188_at | 1.90E−04 | ZNF623 |
| 8708 | 220444_at | 1.00E−13 | ZNF557 |
| 8763 | 1566503_at | 1.70E−04 | — |
| 8766 | 234193_at | 4.92E−04 | — |
| 8768 | 227234_at | 3.00E−10 | LOC100132815 |
| 8792 | 215196_at | 2.00E−05 | — |
| 8792 | 233677_at | 1.10E−04 | — |
| 8792 | 234190_at | 2.58E−04 | — |
| 8792 | 232144_at | 3.20E−04 | — |
| 8792 | 1552509_a_at | 2.00E−05 | CD300LG |
| 8792 | 225708_at | 4.00E−05 | MED29 |
| 8792 | 1564093_at | 2.00E−04 | NEK1 |
| 8792 | 219347_at | 6.49E−04 | NUDT15 |
| 8792 | 241972_at | 4.00E−05 | LOC401588 |
| 8799 | 208368_s_at | 6.04E−04 | BRCA2 |
| 8799 | 215374_at | 1.00E−10 | PAPOLA |
| 8799 | 235448_at | 6.00E−08 | ZXDC |
| 8806 | 1562731_s_at | 4.00E−05 | MDS2 |
| 8812 | 220019_s_at | 3.50E−07 | ZNF224 |
| 8821 | 1561408_at | 0.005 | — |
| 8821 | 240068_at | 0.005 | LINC00323 |
| 8821 | 207084_at | 0.005 | POU3F2 |
| 8824 | 206203_at | 0.001 | RCVRN |
| 8829 | 1569830_at | 0.001 | PTPRC |
| 8835 | 242978_x_at | 0.00195 | — |
| 8837 | 215919_s_at | 0.005 | MRPS11 |
| 8837 | 210580_x_at | 1.00E−04 | SLX1A-SULT1A3 /// SLX1B-SULT1A4 /// SULT1A3 /// SULT1A4 |
| 8837 | 243553_x_at | 0.005 | TRAF3IP2-AS1 |
| 8837 | 217220_at | 0.005 | LOC100287387 |
| 8837 | 1559059_s_at | 0.001367 | ZNF611 |
| 8837 | 217541_x_at | 6.50E−05 | ZNF816 /// ZNF816-ZNF321P |
| 8841 | 237768_x_at | 1.65E−04 | — |
| 8851 | 233754_x_at | 4.00E−04 | ZNF71 |
| 63 | 1565621_at | 3.00E−05 | — |
| 63 | 1552674_at | 5.00E−09 | DIRC1 |
| 63 | 221536_s_at | 2.00E−07 | LSG1 |
| 63 | 215302_at | 2.50E−09 | LOC257152 |
| 8867 | 233616_at | 7.50E−04 | — |
| 8867 | 237451_x_at | 0.001 | — |
| 8867 | 232511_at | 0.001 | — |
| 8867 | 239235_at | 0.00253 | — |
| 8867 | 221980_at | 3.33E−04 | EMILIN2 |
| 8867 | 205085_at | 0.001 | ORC1 |
| 8867 | 224226_at | 0.005 | PKD2L2 |
| 8867 | 230490_x_at | 0.001 | RSU1 |
| 8867 | 206529_x_at | 3.64E−04 | SLC26A4 |
| 8867 | 235325_at | 0.005 | SPG7 |
| 8867 | 232588_at | 4.00E−04 | STAG1 |
| 8867 | 1562470_at | 0.001 | TCEANC2 |
| 8867 | 235587_at | 0.001 | LOC202781 |
| 8889 | 244677_at | 1.67E−04 | — |
| 8889 | 1569772_x_at | 2.05E−04 | — |
| 8889 | 214605_x_at | 1.25E−04 | GPR1 |
| 8889 | 1560448_at | 1.68E−04 | PRR7-AS1 |
| 66 | 1568755_a_at | 2.00E−04 | — |
| 66 | 237489_at | 7.00E−04 | — |
| 66 | 243442_x_at | 7.00E−04 | — |
| 66 | 243866_x_at | 7.00E−04 | — |
| 66 | 224119_at | 7.00E−04 | — |
| 66 | 1561606_at | 7.00E−04 | — |
| 66 | 233824_at | 0.0016 | — |
| 66 | 231825_x_at | 0.002 | ATF7IP |
| 66 | 1565939_at | 7.00E−04 | C5orf22 |
| 66 | 241784_x_at | 0.002 | HELQ |
| 66 | 235783_at | 2.00E−04 | MRTO4 |
| 66 | 217526_at | 7.00E−04 | NFATC2IP |
| 66 | 216755_at | 7.00E−04 | OSBPL10 |
| 66 | 206056_x_at | 2.00E−04 | SPN |
| 66 | 1553020_at | 0.002 | SMCR5 |
| 66 | 204124_at | 6.00E−05 | SLC34A2 |
| 66 | 1570293_at | 7.00E−04 | TBL1X |
| 66 | 215892_at | 2.00E−04 | ZNF440 |
| 67 | 215019_x_at | 9.01E−04 | ZNF528 |
| 8915 | 232338_at | 3.56E−04 | — |
| 5931 | 221653_x_at | 5.00E−06 | APOL2 |
| 8960 | 243658_at | 3.50E−06 | — |
| 8960 | 237561_x_at | 0.00105 | — |
| 8960 | 220255_at | 1.00E−04 | FANCE |
| 8960 | 243630_at | 3.00E−05 | NDUFB1 |
| 5935 | 236802_at | 3.00E−04 | — |
| 8991 | 242423_x_at | 1.00E−04 | — |
| 8991 | 236801_at | 0.001 | — |
| 8991 | 1570331_at | 0.0011 | — |
| 8991 | 1566123_at | 5.01E−05 | FABP6 |
| 8991 | 210705_s_at | 5.45E−05 | TRIM5 |
| 5937 | 215636_at | 6.73E−05 | UBR4 |
| 8998 | 242950_x_at | 1.34E−05 | — |
| 8998 | 237245_at | 3.01E−05 | — |
| 8998 | 221130_s_at | 1.00E−04 | — |
| 8998 | 1563052_at | 1.01E−04 | — |
| 8998 | 1560026_at | 2.00E−04 | — |
| 8998 | 1565596_at | 3.12E−04 | — |
| 8998 | 1570645_at | 4.02E−04 | — |
| 8998 | 234765_at | 4.50E−04 | — |
| 8998 | 232743_at | 7.00E−04 | — |
| 8998 | 1557908_at | 7.00E−04 | — |
| 8998 | 1555117_at | 7.00E−04 | — |
| 8998 | 234113_at | 8.34E−04 | — |
| 8998 | 232867_at | 8.50E−04 | — |
| 8998 | 234084_x_at | 8.91E−04 | — |
| 8998 | 216858_x_at | 9.00E−04 | — |
| 8998 | 217479_at | 9.25E−04 | — |
| 8998 | 1560638_a_at | 9.33E−04 | — |
| 8998 | 1569929_at | 0.001006 | — |
| 8998 | 1565705_x_at | 0.001007 | — |
| 8998 | 1557849_at | 0.00103 | — |
| 8998 | 1559709_at | 0.0011 | — |
| 8998 | 232775_at | 0.001301 | — |
| 8998 | 1565825_at | 0.001333 | — |
| 8998 | 1566609_at | 0.001347 | — |
| 8998 | 233478_at | 0.0015 | — |
| 8998 | 1561463_at | 0.0016 | — |
| 8998 | 241680_at | 0.002 | — |
| 8998 | 1568754_at | 0.002 | — |
| 8998 | 1563482_at | 0.002 | — |
| 8998 | 215128_at | 0.002204 | — |
| 8998 | 1555421_at | 1.01E−05 | AP1S3 |
| 8998 | 235647_at | 5.00E−04 | AP4S1 |
| 8998 | 212972_x_at | 0.002333 | APBB2 |
| 8998 | 203507_at | 6.78E−04 | CD68 |
| 8998 | 235918_x_at | 0.0014 | CEP97 |
| 8998 | 220084_at | 0.0035 | C14orf105 |
| 8998 | 217752_s_at | 0.0035 | CNDP2 |
| 8998 | 236900_x_at | 6.00E−04 | CCDC163P |
| 8998 | 1553811_at | 2.09E−04 | FAM222A-AS1 |
| 8998 | 204403_x_at | 1.50E−04 | FAM115A /// LOC100294033 |
| 8998 | 220896_at | 0.001015 | FBXL18 |
| 8998 | 211040_x_at | 3.53E−04 | GTSE1 |
| 8998 | 204318_s_at | 6.82E−04 | GTSE1 |
| 8998 | 214205_x_at | 2.76E−05 | GLRX3 |
| 8998 | 223563_at | 1.01E−05 | GNB1L |
| 8998 | 220081_x_at | 1.70E−04 | HSD17B7 |
| 8998 | 1553888_at | 1.01E−05 | LDHAL6A |
| 8998 | 1562392_at | 0.00115 | MRPL23 |
| 8998 | 214826_at | 7.00E−04 | PDE12 |
| 8998 | 214664_at | 2.00E−04 | PAICS |
| 8998 | 208828_at | 2.00E−04 | POLE3 |
| 8998 | 1553761_at | 4.60E−04 | PRR14L |
| 8998 | 215618_at | 0.001354 | RSU1 |
| 8998 | 1562428_at | 0.002 | LOC654780 |
| 8998 | 1570130_at | 1.75E−04 | SPATS2 |
| 8998 | 206438_x_at | 3.35E−05 | TCTN2 |
| 8998 | 223771_at | 1.67E−04 | TMEM87A |
| 8998 | 235097_at | 2.00E−04 | TRMT44 |
| 8998 | 220403_s_at | 8.50E−04 | TP53AIP1 |
| 8998 | 232420_x_at | 0.001 | LOC100289341 |
| 8998 | 1568722_at | 1.40E−05 | LOC100506832 |
| 8998 | 227940_at | 3.53E−04 | LOC339803 |
| 8998 | 1556609_at | 6.75E−04 | LOC401098 |
| 8998 | 232873_at | 3.90E−04 | ZNF33A |
| 8998 | 1552427_at | 9.00E−04 | ZNF485 |
| 8998 | 1558743_at | 0.001333 | ZNF620 |
| 9002 | 1563076_x_at | 2.00E−04 | — |
| 9002 | 1563075_s_at | 2.00E−04 | — |
| 9002 | 238701_x_at | 0.001 | C11orf92 |
| 9002 | 216288_at | 0.002 | CYSLTR1 |
| 9002 | 211481_at | 0.002 | SLCO1A2 |
| 9018 | 220509_at | 0.004 | RBM26 |
| 9035 | 217481_x_at | 1.05E−04 | — |
| 9035 | 1559795_at | 2.55E−04 | — |
| 9035 | 216642_at | 7.01E−04 | — |
| 9035 | 203989_x_at | 1.27E−04 | F2R |
| 9035 | 207115_x_at | 1.59E−04 | MBTD1 |
| 9035 | 209638_x_at | 5.15E−04 | RGS12 |
| 9035 | 233242_at | 0.001175 | WDR73 |
| 9035 | 241950_at | 3.66E−05 | WWC1 |
| 9040 | 206515_at | 4.00E−04 | CYP4F3 |
| 9040 | 220138_at | 0.005 | HAND1 |
| 9040 | 204735_at | 4.00E−04 | PDE4A |
| 9040 | 220984_s_at | 0.0015 | SLCO5A1 |
| 9040 | 1570006_at | 4.00E−04 | LOC400958 |
| 9051 | 235399_at | 3.00E−05 | — |
| 9051 | 1563345_at | 0.002008 | — |
| 9053 | 1562036_at | 4.00E−05 | — |
| 9056 | 244621_x_at | 0.003 | — |
| 9056 | 219223_at | 0.003 | CACFD1 |
| 9056 | 203787_at | 3.00E−04 | SSBP2 |
| 5944 | 1559682_at | 3.00E−04 | — |
| 5944 | 1560177_at | 2.00E−05 | CCDC66 |
| 5944 | 216768_x_at | 3.62E−04 | TTC38 |
| 5945 | 1566176_at | 0.0035 | — |
| 890 | 233289_at | 1.15E−04 | — |
| 890 | 1570127_at | 9.23E−04 | — |
| 890 | 1555375_at | 7.00E−05 | GRIK2 |
| 890 | 234341_x_at | 4.01E−05 | LOC91548 |
| 915 | 233154_at | 3.50E−04 | — |
| 915 | 1568892_at | 6.59E−04 | — |
| 915 | 238382_x_at | 6.67E−04 | — |
| 915 | 222299_x_at | 6.67E−04 | — |
| 915 | 234059_at | 6.93E−04 | — |
| 915 | 1566480_x_at | 3.30E−04 | C17orf104 |
| 915 | 221898_at | 0.001048 | PDPN |
| 921 | 217591_at | 2.16E−05 | — |
| 921 | 1564840_at | 2.88E−05 | — |
| 921 | 1557751_at | 9.83E−05 | — |
| 921 | 1570249_x_at | 2.02E−04 | — |
| 921 | 232468_at | 3.33E−04 | — |
| 921 | 233427_x_at | 4.32E−04 | — |
| 921 | 1561604_at | 4.81E−04 | — |
| 921 | 217643_x_at | 5.17E−04 | — |
| 921 | 233081_at | 5.38E−04 | — |
| 921 | 217288_at | 6.13E−04 | — |
| 921 | 215182_x_at | 6.13E−04 | — |
| 921 | 243167_at | 1.61E−04 | ABCB5 |
| 921 | 220600_at | 0.001033 | C3orf75 |
| 921 | 228700_at | 6.60E−04 | CXorf38 |
| 921 | 211286_x_at | 4.04E−06 | CSF2RA |
| 921 | 1556821_x_at | 8.33E−04 | DLEU2 |
| 921 | 1556820_a_at | 8.33E−04 | DLEU2 |
| 921 | 213475_s_at | 5.38E−04 | ITGAL |
| 921 | 221621_at | 7.61E−05 | LINC00338 /// SCARNA16 |
| 921 | 232034_at | 5.33E−04 | LINC00537 |
| 921 | 210722_at | 5.25E−04 | PNLIPRP1 |
| 921 | 235792_x_at | 2.52E−04 | PIK3C2A |
| 921 | 204461_x_at | 2.47E−04 | RAD1 |
| 921 | 217670_at | 0.00108 | RPLP2 |
| 921 | 1564972_x_at | 8.11E−04 | SETDB2 |
| 921 | 1564970_at | 8.11E−04 | SETDB2 |
| 921 | 206147_x_at | 4.04E−04 | SCML2 |
| 921 | 208157_at | 1.44E−05 | SIM2 |
| 921 | 1561080_at | 8.40E−04 | TXNRD1 |
| 921 | 207907_at | 4.02E−04 | TNFSF14 |
| 921 | 222280_at | 5.50E−04 | LOC100506469 |
| 921 | 239168_at | 4.51E−05 | LOC100652811 /// LOC100653083 /// LOC150622 /// LOC400940 |
| 921 | 208136_s_at | 6.87E−05 | MGC3771 |
| 921 | 1564362_x_at | 4.66E−04 | ZNF843 |
| 932 | 244533_at | 4.02E−04 | PTPN14 |
| 952 | 232496_at | 5.06E−04 | — |
| 952 | 210595_at | 6.82E−05 | ZNF235 |
| 980 | 1558965_at | 0.001 | PHF21A |
| 980 | 222564_at | 0.001 | POGK |
| 984 | 244620_at | 4.00E−10 | SLC8A1-AS1 |
| 1001 | 214989_x_at | 5.05E−04 | — |
| 5968 | 234762_x_at | 9.42E−04 | NLN |
| 1033 | 242859_at | 5.50E−04 | — |
| 1033 | 1561555_at | 6.26E−04 | — |
| 1033 | 1557522_x_at | 6.84E−04 | — |
| 1033 | 220856_x_at | 7.00E−04 | — |
| 1033 | 217698_at | 0.00125 | — |
| 1033 | 239222_at | 5.22E−04 | C9orf9 |
| 1033 | 217598_at | 2.56E−04 | CINP |
| 1033 | 212959_s_at | 4.57E−04 | GNPTAB |
| 1038 | 216337_at | 8.00E−05 | — |
| 1038 | 241722_x_at | 8.00E−05 | — |
| 1038 | 233376_at | 1.00E−04 | — |
| 1038 | 209770_at | 4.03E−05 | BTN3A1 |
| 1038 | 1556588_at | 2.00E−07 | C15orf37 |
| 1038 | 220180_at | 4.00E−08 | CCDC68 |
| 1038 | 235280_at | 4.00E−08 | POLR1A |
| 1043 | 1562673_at | 5.14E−04 | — |
| 1047 | 217610_at | 3.50E−04 | SPDYE2 |
| 1056 | 1565641_at | 0.0035 | C16orf45 |
| 1086 | 216463_at | 2.75E−04 | — |
| 1129 | 242589_x_at | 0.004 | — |
| 1138 | 215852_x_at | 0.00117 | SOGA1 |
| 1145 | 1558623_at | 1.00E−07 | LOC729121 |
| 1194 | 1558237_x_at | 2.00E−05 | — |
| 1221 | 205565_s_at | 0.001 | FXN |
| 1231 | 234920_at | 9.42E−04 | ZNF7 |
| 1231 | 223607_x_at | 0.005 | ZSWIM1 |
| 1252 | 225363_at | 4.00E−04 | PTEN |
| 1280 | 204028_s_at | 2.00E−07 | RABGAP1 |
| 1286 | 210138_at | 0.003 | RGS20 |
| 1286 | 205497_at | 0.003 | ZNF175 |
| 1302 | 1570151_at | 0.004 | — |
| 1302 | 1558489_at | 0.004 | — |
| 1302 | 1560754_at | 0.004 | CMTM7 |
| 1314 | 1555798_at | 0.001 | LOC400692 |
| 1339 | 1555374_at | 1.00E−05 | — |
| 1339 | 242371_x_at | 1.00E−04 | — |
| 1339 | 233055_at | 5.05E−04 | — |
| 1339 | 1564937_at | 6.14E−04 | — |
| 1339 | 215529_x_at | 9.33E−05 | DIP2A |
| 1339 | 242195_x_at | 0.00145 | NUMBL |
| 1340 | 241979_x_at | 0.004 | — |
| 1353 | 216146_at | 2.00E−04 | — |
| 1353 | 244088_at | 0.002 | — |
| 1353 | 1569321_at | 0.002 | — |
| 1353 | 1557542_at | 0.002 | — |
| 1390 | 239321_at | 0.003 | LOC441454 |
| 1394 | 1564568_at | 2.00E−04 | — |
| 1394 | 241268_x_at | 3.35E−04 | — |
| 1394 | 234439_at | 0.002 | — |
| 1407 | 240978_at | 3.40E−04 | — |
| 6009 | 242675_x_at | 0.002 | — |
| 1425 | 1559508_at | 3.55E−04 | — |
| 1425 | 1566232_at | 4.00E−04 | — |
| 1428 | 216793_x_at | 7.54E−04 | — |
| 1428 | 203904_x_at | 1.58E−04 | CD82 |
| 1428 | 235202_x_at | 2.91E−04 | IKBIP |
| 1446 | 230739_at | 0.002333 | FAM210A |
| 1449 | 1556797_at | 0.00225 | RNF144A-AS1 |
| 1468 | 1555400_at | 9.80E−05 | LOC645261 |
| 1471 | 1569537_at | 0.004 | — |
| 1501 | 232800_at | 4.00E−04 | — |
| 1501 | 216101_at | 0.001 | — |
| 1501 | 1560219_at | 0.001334 | ASB3 |
| 1510 | 244253_at | 0.003 | — |
| 1515 | 210723_x_at | 0.001025 | — |
| 1516 | 242842_at | 8.00E−04 | — |
| 1516 | 1557584_at | 0.003 | — |
| 1516 | 223431_at | 2.00E−04 | CNO |
| 1516 | 1553150_at | 0.0017 | KDM1B |
| 1516 | 227979_at | 8.00E−04 | RBM4 |
| 1516 | 1560679_at | 8.00E−04 | LOC100506328 |
| 1562 | 1570578_at | 6.00E−04 | — |
| 1562 | 235834_at | 6.00E−04 | CALD1 |
| 1562 | 227628_at | 0.001334 | GPX8 |
| 1562 | 235279_at | 2.00E−04 | PARVA |
| 1562 | 1563680_at | 2.62E−04 | LOC284950 |
| 9164 | 232054_at | 0.003 | PCDH20 |
| 9202 | 234805_at | 1.82E−04 | — |
| 9276 | 237853_x_at | 9.00E−04 | KRTAP10-12 |
| 9295 | 223019_at | 0.004 | FAM129B |
| 9320 | 1554849_at | 2.63E−04 | TOR1A |
| 9330 | 203898_at | 5.77E−04 | CRCP |
| 9330 | 1561532_at | 1.01E−05 | DACT3-AS1 |
| 9338 | 1558028_x_at | 0.001209 | LOC647979 |
| 9345 | 1554608_at | 6.46E−04 | TGOLN2 |
| 9347 | 236060_at | 9.13E−04 | — |
| 9347 | 233868_x_at | 0.00135 | ADAM33 |
| 9347 | 214782_at | 0.001348 | CTTN |
| 9347 | 242472_x_at | 1.52E−04 | FNBP4 |
| 9347 | 216188_at | 9.13E−04 | MYCNOS |
| 9347 | 219975_x_at | 4.61E−04 | OLAH |
| 9347 | 217049_x_at | 0.00117 | PCDH11X /// PCDH11Y |
| 9347 | 1570528_at | 0.002033 | XYLT2 |
| 9352 | 1564155_x_at | 0.001164 | — |
| 9352 | 1564154_at | 0.001164 | — |
| 9352 | 220039_s_at | 0.001601 | CDKAL1 |
| 9352 | 1566208_at | 2.00E−04 | TCEA1 |
| 9352 | 229587_at | 2.00E−04 | UBA2 |
| 9354 | 215595_x_at | 3.81E−04 | — |
| 9365 | 1559683_at | 1.05E−05 | — |
| 9365 | 234156_at | 2.33E−05 | — |
| 9365 | 217423_at | 2.50E−05 | — |
| 9365 | 222356_at | 2.00E−04 | — |
| 9365 | 1563934_at | 2.16E−04 | — |
| 9365 | 222170_at | 3.71E−04 | — |
| 9365 | 217616_at | 5.00E−04 | — |
| 9365 | 232840_at | 5.01E−04 | — |
| 9365 | 209155_s_at | 5.20E−04 | NT5C2 |
| 9365 | 1554246_at | 3.52E−04 | C1orf210 |
| 9365 | 233645_s_at | 2.00E−04 | C1RL |
| 9365 | 1560043_at | 1.00E−06 | CYB5R1 |
| 9365 | 213631_x_at | 2.97E−04 | DHODH |
| 9365 | 1564473_at | 4.51E−04 | ESCO2 |
| 9365 | 214124_x_at | 0.0011 | FGFR1OP |
| 9365 | 212221_x_at | 3.08E−04 | IDS |
| 9365 | 203943_at | 7.00E−04 | KIF3B |
| 9365 | 214675_at | 2.46E−04 | NUP188 |
| 9365 | 215863_at | 1.25E−04 | TFR2 |
| 9365 | 244716_x_at | 4.38E−04 | TMIGD2 |
| 9365 | 219589_s_at | 1.25E−04 | TMEM143 |
| 9365 | 244495_x_at | 8.13E−04 | TMEM241 |
| 9365 | 236715_x_at | 6.64E−04 | UACA |
| 9365 | 221626_at | 5.00E−05 | ZNF506 |
| 9385 | 1564767_at | 3.27E−04 | — |
| 9385 | 1569365_a_at | 0.002 | KIAA1656 |
| 9385 | 1554468_s_at | 0.00245 | MRPL38 |
| 9385 | 221859_at | 0.004 | SYT13 |
| 9385 | 1560390_s_at | 0.004 | LOC284440 |
| 9385 | 1554388_at | 7.67E−04 | VPS29 |
| 9386 | 215361_at | 3.00E−06 | DOCK5 |
| 9386 | 208674_x_at | 3.64E−04 | DDOST |
| 9386 | 231959_at | 5.00E−06 | LIN52 |
| 9386 | 223770_x_at | 8.24E−05 | MRI1 |
| 9386 | 1562321_at | 6.00E−06 | PDK4 |
| 9386 | 206487_at | 5.54E−04 | SUN1 |
| 9386 | 1558888_x_at | 0.00109 | ZNF321P /// ZNF816 /// ZNF816-ZNF321P |
| 9386 | 208137_x_at | 3.25E−04 | ZNF611 |
| 9386 | 220760_x_at | 5.00E−06 | ZNF665 |
| 9390 | 215233_at | 3.44E−04 | JMJD6 |
| 9397 | 210599_at | 3.00E−12 | ZNF614 |
| 9402 | 222888_at | 1.00E−04 | CCNJ |
| 5636 | 215439_x_at | 3.77E−04 | — |
| 1595 | 222206_s_at | 0.005 | NCLN |
| 1599 | 1557151_at | 3.00E−04 | — |
| 1599 | 243642_x_at | 6.00E−04 | — |
| 1599 | 1566777_at | 0.001 | — |
| 1604 | 222864_s_at | 0.001 | ZNF219 |
| 1611 | 207734_at | 0.004 | LAX1 |
| 1711 | 1560917_at | 9.01E−06 | — |
| 1711 | 215397_x_at | 1.50E−05 | — |
| 1711 | 215406_at | 1.60E−04 | — |
| 1711 | 216645_at | 2.42E−04 | — |
| 1711 | 1562265_at | 2.44E−04 | — |
| 1711 | 214912_at | 2.77E−04 | — |
| 1711 | 1557842_at | 2.90E−04 | — |
| 1711 | 215370_at | 3.34E−04 | — |
| 1711 | 233553_at | 3.34E−04 | — |
| 1711 | 1558078_at | 3.35E−04 | — |
| 1711 | 1563519_at | 5.50E−04 | — |
| 1711 | 1554972_at | 6.00E−04 | — |
| 1711 | 1556327_a_at | 7.51E−04 | — |
| 1711 | 215650_at | 7.86E−04 | — |
| 1711 | 207915_at | 8.00E−04 | — |
| 1711 | 1559210_at | 8.63E−04 | — |
| 1711 | 216527_at | 0.001 | — |
| 1711 | 216198_at | 1.00E−05 | ATF7IP |
| 1711 | 215590_x_at | 2.00E−05 | ACVR2B-AS1 |
| 1711 | 1558792_x_at | 0.001006 | AP2A1 |
| 1711 | 1553253_at | 0.001 | ASB16 |
| 1711 | 215365_at | 0.0015 | CACNB2 |
| 1711 | 1557801_x_at | 0.00105 | C11orf31 |
| 1711 | 1557799_at | 0.00105 | C11orf31 |
| 1711 | 214816_x_at | 3.10E−04 | C19orf40 |
| 1711 | 232266_x_at | 8.17E−04 | CDK13 |
| 1711 | 210965_x_at | 0.00155 | CDK13 |
| 1711 | 202577_s_at | 0.001333 | DDX19A |
| 1711 | 204211_x_at | 2.17E−04 | EIF2AK2 |
| 1711 | 216786_at | 9.63E−04 | FAM224A |
| 1711 | 215602_at | 4.00E−05 | FGD2 |
| 1711 | 211424_x_at | 1.22E−04 | METTL7A |
| 1711 | 209703_x_at | 1.22E−04 | METTL7A |
| 1711 | 205989_s_at | 8.06E−04 | MOG |
| 1711 | 215850_s_at | 1.03E−04 | NDUFA5 |
| 1711 | 228676_at | 1.75E−04 | ORAOV1 |
| 1711 | 217624_at | 6.90E−04 | PDAP1 |
| 1711 | 219392_x_at | 1.86E−04 | PRR11 |
| 1711 | 226090_x_at | 0.001377 | RABL3 |
| 1711 | 217775_s_at | 1.00E−05 | RDH11 |
| 1711 | 1559882_at | 8.00E−05 | SAMHD1 |
| 1711 | 215889_at | 4.00E−04 | SKIL |
| 1711 | 205255_x_at | 4.67E−04 | TCF7 |
| 1711 | 214815_at | 5.00E−04 | TRIM33 |
| 1711 | 214817_at | 4.03E−04 | UNC13A |
| 1711 | 232731_x_at | 5.13E−04 | LOC100190938 |
| 1711 | 220401_at | 0.001158 | FLJ21369 |
| 1711 | 207090_x_at | 4.67E−04 | ZFP30 |
| 1717 | 1569732_at | 4.55E−06 | — |
| 1717 | 233038_at | 3.81E−04 | — |
| 1717 | 223815_at | 2.28E−04 | CEP95 |
| 1717 | 224672_x_at | 3.60E−04 | MESDC2 |
| 1718 | 234170_at | 6.00E−04 | — |
| 1718 | 1564665_at | 0.003 | — |
| 1718 | 244052_at | 0.001 | CBR4 |
| 1718 | 206247_at | 0.001325 | MICB |
| 1718 | 1559705_s_at | 0.001001 | PHKA2 |
| 1718 | 216161_at | 9.50E−04 | SBNO1 |
| 1718 | 1561059_a_at | 6.67E−04 | LOC152024 |
| 1723 | 200905_x_at | 3.10E−05 | HLA-E |
| 1723 | 210389_x_at | 5.00E−06 | TUBD1 |
| 1725 | 1557996_at | 7.67E−04 | — |
| 1732 | 1562898_at | 2.55E−04 | — |
| 1772 | 235381_at | 0.002 | RSF1 |
| 1776 | 1554786_at | 1.00E−05 | CASS4 |
| 1782 | 223335_at | 4.00E−07 | TMEM69 |
| 1792 | 1564449_at | 6.23E−04 | — |
| 1792 | 216163_at | 7.60E−04 | — |
| 1792 | 243901_at | 5.60E−04 | ALDOB |
| 1792 | 211277_x_at | 8.58E−04 | APP |
| 1792 | 207262_at | 6.85E−04 | APOF |
| 1792 | 206775_at | 0.00156 | CUBN |
| 1792 | 205370_x_at | 4.66E−04 | DBT |
| 1792 | 222733_x_at | 7.58E−04 | RRP1 |
| 1792 | 206057_x_at | 0.001388 | SPN |
| 1792 | 216981_x_at | 0.001388 | SPN |
| 1792 | 1565771_at | 0.001206 | DKFZp434E1119 |
| 1792 | 242633_x_at | 9.50E−04 | ZNF75A |
| 1797 | 241835_at | 0.004 | — |
| 1842 | 232106_s_at | 4.67E−04 | CEP89 |
| 1859 | 1566716_at | 3.01E−04 | — |
| 1885 | 234627_at | 0.001683 | FLJ21408 |
| 1889 | 1569542_at | 5.10E−04 | — |
| 1889 | 228141_at | 4.27E−04 | GPX8 |
| 1889 | 238489_at | 0.0025 | PRKAA2 |
| 1889 | 1559126_at | 0.001 | RRP12 |
| 1890 | 207481_at | 0.001231 | — |
| 1891 | 232803_at | 2.65E−04 | — |
| 1891 | 244197_x_at | 5.00E−04 | — |
| 1891 | 232797_at | 5.00E−04 | — |
| 1891 | 220144_s_at | 1.00E−04 | ANKRD5 |
| 1891 | 228813_at | 5.00E−04 | HDAC4 |
| 1891 | 1553808_a_at | 0.002 | NKX2-3 |
| 1891 | 219105_x_at | 0.001036 | ORC6 |
| 1891 | 1558365_at | 5.00E−04 | LOC100652805 /// LOC100653302 /// PGK1 |
| 1891 | 1553354_a_at | 1.00E−04 | FLJ31958 |
| 1951 | 1558402_at | 9.45E−04 | — |
| 1955 | 242448_at | 8.00E−05 | — |
| 1955 | 217580_x_at | 0.001 | — |
| 1955 | 217579_x_at | 0.001 | — |
| 1955 | 231880_at | 0.003 | FAM40B |
| 1955 | 218413_s_at | 0.003 | ZNF639 |
| 98 | 217537_x_at | 6.00E−05 | — |
| 98 | 234266_at | 1.67E−04 | — |
| 98 | 217490_at | 2.69E−04 | — |
| 98 | 216496_s_at | 5.00E−04 | — |
| 98 | 220689_at | 5.00E−04 | — |
| 98 | 216769_x_at | 6.38E−04 | — |
| 98 | 241724_x_at | 8.96E−04 | — |
| 98 | 233448_s_at | 9.19E−04 | — |
| 98 | 216179_x_at | 0.001027 | — |
| 98 | 1570013_at | 0.001301 | — |
| 98 | 1563561_at | 0.001757 | — |
| 98 | 1553234_at | 1.75E−04 | ADAMTS18 |
| 98 | 1570128_at | 3.34E−04 | DDX19A |
| 98 | 1568884_at | 0.001067 | DNAJC2 |
| 98 | 219618_at | 3.54E−04 | IRAK4 |
| 98 | 243539_at | 3.02E−04 | KIAA1841 |
| 98 | 1552979_at | 7.24E−04 | LINC00471 |
| 98 | 1559167_x_at | 0.001125 | MPV17L |
| 98 | 236860_at | 6.67E−04 | NPY6R |
| 98 | 1553364_at | 0.00123 | PNPLA1 |
| 98 | 202739_s_at | 5.98E−04 | PHKB |
| 98 | 1556308_at | 6.88E−04 | PRRT3 |
| 98 | 217348_x_at | 2.56E−04 | ARHGEF15 |
| 98 | 222121_at | 5.67E−04 | ARHGEF26 |
| 98 | 233903_s_at | 5.67E−04 | ARHGEF26 |
| 98 | 210760_x_at | 4.15E−04 | TRIP11 |
| 98 | 1565723_at | 3.50E−04 | LOC100128281 |
| 98 | 207263_x_at | 0.00107 | VEZT |
| 98 | 232303_at | 2.25E−05 | ZNF608 |
| 101 | 1569999_at | 0.004 | — |
| 2012 | 233273_at | 0.00155 | — |
| 2035 | 215768_at | 0.001 | — |
| 2035 | 1566637_at | 0.001 | — |
| 2035 | 1564007_at | 0.001 | — |
| 2035 | 1561192_at | 0.001 | — |
| 2035 | 216144_at | 0.001252 | — |
| 2035 | 1566459_at | 0.001295 | — |
| 2035 | 233906_at | 0.003 | — |
| 2035 | 209774_x_at | 0.001 | CXCL2 |
| 2035 | 1561190_at | 0.001067 | CDKL3 |
| 2035 | 201313_at | 0.003 | ENO2 |
| 2035 | 209193_at | 0.003 | PIM1 |
| 2035 | 1553717_at | 5.25E−04 | KCTD7 /// RABGEF1 |
| 2035 | 1563581_at | 5.69E−04 | RPL34-AS1 |
| 2035 | 204743_at | 0.0025 | TAGLN3 |
| 2035 | 237745_at | 0.001 | TSC22D1-AS1 |
| 2035 | 229930_at | 0.001 | LOC100134361 |
| 2035 | 1569318_at | 0.001 | LOC284440 |
| 2045 | 202464_s_at | 0.001 | PFKFB3 |
| 2049 | 202015_x_at | 2.52E−06 | — |
| 2080 | 1569192_at | 1.01E−04 | — |
| 2080 | 215204_at | 4.78E−04 | — |
| 2080 | 216103_at | 0.003 | ACOT11 |
| 2080 | 207536_s_at | 4.44E−04 | TNFRSF9 |
| 2108 | 232754_at | 0.0025 | — |
| 2110 | 215587_x_at | 5.91E−04 | — |
| 2113 | 221815_at | 2.00E−06 | ABHD2 |
| 2124 | 233931_at | 1.48E−04 | — |
| 115 | 234491_s_at | 0.0025 | SAV1 |
| 2135 | 1561571_at | 1.00E−07 | LOC730139 |
| 2136 | 1566183_at | 0.00124 | — |
| 2136 | 204842_x_at | 0.001733 | PRKAR2A |
| 2146 | 1562297_at | 0.004 | — |
| 2191 | 207524_at | 0.002 | ST7 /// ST7-OT3 |
| 123 | 234060_at | 0.001244 | — |
| 2219 | 1558595_at | 0.003 | — |
| 125 | 1557004_at | 2.00E−14 | LOC100505902 /// LOC285389 |
| 2228 | 222006_at | 0.001667 | LETM1 |
| 130 | 209246_at | 0.001167 | ABCF2 |
| 130 | 233254_x_at | 0.004 | PTEN |
| 130 | 205628_at | 3.00E−04 | PRIM2 |
| 2270 | 243310_at | 2.00E−04 | — |
| 2270 | 1569983_at | 2.60E−05 | LINC00566 |
| 2270 | 1560202_at | 4.00E−06 | LOC338739 |
| 2322 | 1557538_at | 0.001317 | — |
| 2333 | 238826_x_at | 0.001 | — |
| 2333 | 203742_s_at | 0.001 | LOC732360 /// TDG |
| 2333 | 234332_at | 0.002004 | NUB1 |
| 2333 | 1569030_s_at | 0.002004 | NUB1 |
| 2340 | 1569566_at | 0.001 | TBC1D1 |
| 139 | 1561432_at | 7.00E−04 | — |
| 139 | 233341_s_at | 2.66E−04 | POLR1B |
| 2365 | 216524_x_at | 0.001338 | — |
| 2365 | 1559206_at | 4.02E−04 | PSEN1 |
| 2379 | 243876_at | 3.00E−04 | — |
| 2379 | 1560451_at | 3.65E−04 | — |
| 2379 | 1566768_at | 5.00E−04 | — |
| 2379 | 222370_x_at | 5.01E−04 | — |
| 2379 | 216472_at | 5.35E−04 | — |
| 2379 | 215197_at | 5.44E−04 | — |
| 2379 | 232665_x_at | 6.61E−04 | — |
| 2379 | 234833_at | 6.67E−04 | — |
| 2379 | 215445_x_at | 7.54E−04 | — |
| 2379 | 1562853_x_at | 8.33E−04 | — |
| 2379 | 1562852_at | 8.33E−04 | — |
| 2379 | 1560971_a_at | 0.001001 | — |
| 2379 | 1555014_x_at | 0.001013 | — |
| 2379 | 233239_at | 0.001041 | — |
| 2379 | 1560560_at | 0.001067 | — |
| 2379 | 210698_at | 0.001258 | — |
| 2379 | 233017_x_at | 0.00129 | — |
| 2379 | 215083_at | 0.002 | — |
| 2379 | 1565877_at | 0.002175 | — |
| 2379 | 1565876_x_at | 0.002175 | — |
| 2379 | 242113_at | 0.0023 | — |
| 2379 | 235716_at | 0.003 | — |
| 2379 | 1555321_at | 0.002 | ACOT11 |
| 2379 | 233182_x_at | 0.00109 | ATXN3 |
| 2379 | 1555323_at | 0.00105 | ABCB9 |
| 2379 | 1557963_at | 2.00E−04 | CDC42BPB |
| 2379 | 209057_x_at | 6.98E−04 | CDC5L |
| 2379 | 215072_x_at | 0.001205 | C10orf137 |
| 2379 | 208115_x_at | 0.001205 | C10orf137 |
| 2379 | 238028_at | 3.75E−04 | C6orf132 |
| 2379 | 1553446_at | 0.002 | C6orf183 |
| 2379 | 206661_at | 5.15E−04 | DBF4B |
| 2379 | 1559039_at | 0.0035 | DHX36 |
| 2379 | 208386_x_at | 4.88E−04 | DMC1 |
| 2379 | 211328_x_at | 0.002 | HFE |
| 2379 | 239177_at | 0.0025 | IRGQ |
| 2379 | 1559142_at | 3.01E−04 | KAT6A |
| 2379 | 215375_x_at | 0.00118 | LRRFIP1 |
| 2379 | 1554582_a_at | 5.15E−04 | METTL20 |
| 2379 | 232168_x_at | 0.00101 | MACF1 |
| 2379 | 225942_at | 0.002 | NLN |
| 2379 | 1568913_at | 7.34E−04 | NSUN3 |
| 2379 | 210636_at | 3.64E−04 | PPARD |
| 2379 | 203555_at | 0.0016 | PTPN18 |
| 2379 | 1560322_at | 2.53E−04 | RBMS3 |
| 2379 | 1568964_x_at | 9.38E−04 | SPN |
| 2379 | 1553011_at | 7.96E−04 | TAF1L |
| 2379 | 1566207_at | 0.00125 | TCEA1 |
| 2379 | 217974_at | 0.0025 | TM7SF3 |
| 2379 | 208099_x_at | 0.003 | TTLL5 |
| 2379 | 1569604_at | 1.79E−04 | LOC100133612 |
| 2379 | 1562095_at | 4.63E−04 | LOC100287789 /// SLMAP |
| 2379 | 211386_at | 0.0025 | MGC12488 |
| 2383 | 236618_at | 1.00E−08 | C20orf132 |
| 2383 | 214601_at | 2.00E−04 | TPH1 |
| 2413 | 240356_s_at | 6.00E−04 | — |
| 2497 | 217586_x_at | 7.80E−04 | — |
| 2497 | 230808_at | 4.34E−04 | FNTA |
| 2497 | 215436_at | 0.0011 | HSDL2 |
| 2497 | 227277_at | 0.0023 | MTDII |
| 2497 | 1559849_at | 9.73E−04 | ZNF605 |
| 2524 | 214902_x_at | 0.001231 | — |
| 2524 | 205096_at | 8.40E−04 | POM121 |
| 2555 | 226212_s_at | 0.004 | INSR |
| 2603 | 208818_s_at | 0.003 | COMT |
| 2603 | 208817_at | 0.003 | COMT |
| 2619 | 1558906_a_at | 3.00E−05 | LOC100505783 |
| 2623 | 215753_at | 9.00E−04 | — |
| 2623 | 216499_at | 0.0015 | — |
| 2623 | 1561451_a_at | 0.001226 | ADAM29 |
| 2623 | 1555981_at | 8.33E−04 | C17orf65 |
| 2623 | 231781_s_at | 8.00E−04 | LRRC2 |
| 2623 | 221605_s_at | 9.19E−04 | PIPOX |
| 2637 | 1565889_at | 0.001533 | — |
| 2637 | 1565888_at | 0.001533 | — |
| 2637 | 242457_at | 0.00215 | — |
| 2651 | 1557232_at | 0.001018 | — |
| 170 & 171 | 235105_at | 0.0021 | — |
| 2723 | 1556595_at | 0.004 | — |
| 2723 | 1559069_at | 0.004 | MTHFS /// ST20-MTHFS |
| 2723 | 206679_at | 0.004 | APBA1 |
| 2723 | 1558868_a_at | 0.004 | DSE |
| 2730 | 235608_at | 0.002 | — |
| 2747 | 1562454_at | 1.00E−04 | — |
| 2747 | 1559420_x_at | 1.00E−04 | CACNB2 |
| 2747 | 1559419_at | 1.00E−04 | CACNB2 |
| 2750 | 1562890_at | 3.05E−04 | — |
| 2750 | 232723_at | 6.44E−04 | — |
| 2750 | 227551_at | 4.65E−04 | FAM108B1 |
| 2750 | 206681_x_at | 3.68E−04 | GP2 |
| 2750 | 1558832_at | 4.67E−04 | SLC2A1-AS1 |
| 2750 | 241643_at | 1.03E−05 | TLK1 |
| 2750 | 241642_x_at | 4.08E−04 | TLK1 |
| 2750 | 1559576_at | 2.00E−06 | WDR78 |
| 2750 | 1559616_x_at | 8.44E−04 | ZNF626 |
| 2779 | 218923_at | 2.00E−04 | CTBS |
| 2785 | 216309_x_at | 0.001 | JRK |
| 2785 | 214692_s_at | 0.001 | JRK |
| 185 | 1561234_at | 6.67E−05 | — |
| 185 | 238570_at | 8.00E−04 | — |
| 185 | 220812_s_at | 6.67E−05 | HHLA2 |
| 185 | 233997_at | 6.67E−05 | LOC100287166 |
| 2824 | 242813_at | 6.43E−04 | — |
| 187 | 233128_at | 0.003 | — |
| 187 | 1563332_at | 0.003 | — |
| 187 | 234737_at | 0.002 | NT5DC3 |
| 187 | 220233_at | 3.00E−04 | FBXO17 /// SARS2 |
| 187 | 242578_x_at | 0.003 | SLC22A3 |
| 2829 | 204861_s_at | 6.00E−10 | LOC100509323 /// NAIP |
| 2829 | 231772_x_at | 2.00E−09 | CENPH |
| 2835 | 1553072_at | 3.00E−08 | BNIPL |
| 2835 | 209941_at | 1.00E−05 | RIPK1 |
| 2860 | 233027_at | 0.001287 | — |
| 2860 | 1560868_s_at | 0.001505 | — |
| 2860 | 238912_x_at | 0.003 | C9orf85 |
| 2860 | 222265_at | 0.00105 | TNS4 |
| 2860 | 215455_at | 0.0025 | TIMELESS |
| 2860 | 232918_at | 0.001043 | LOC541471 |
| 191 | 1564294_at | 1.45E−04 | — |
| 191 | 1564794_at | 2.00E−04 | — |
| 191 | 1564789_at | 2.00E−04 | — |
| 191 | 1559436_x_at | 2.00E−04 | — |
| 191 | 1556176_at | 2.00E−04 | TAF8 |
| 2899 | 204746_s_at | 0.004 | PICK1 |
| 2981 | 1566043_at | 0.002045 | — |
| 2991 | 1569948_at | 6.00E−04 | — |
| 2991 | 219380_x_at | 1.00E−04 | POLH |
| 208 | 204845_s_at | 0.003 | ENPEP |
| 2946 | 1566482_at | 0.005 | — |
| 2946 | 224707_at | 0.005 | CYSTM1 |
| 2952 | 219058_x_at | 9.61E−04 | TINAGL1 |
| 211 | 238656_at | 4.00E−04 | — |
| 3081 | 233608_at | 2.67E−04 | — |
| 3081 | 224134_at | 0.002 | MGC10814 |
| 3095 | 202495_at | 0.004 | TBCC |
| 3102 | 219605_at | 4.00E−04 | ZNF3 |
| 3110 | 210486_at | 0.001028 | ANKMY1 |
| 3143 | 1564463_at | 0.001038 | LOC100499221 |
| 3145 | 224227_s_at | 2.70E−23 | BDP1 |
| 3210 | 1553910_at | 1.00E−21 | NBFF4 |
| 3290 | 232622_at | 2.65E−04 | — |
| 3294 | 230118_at | 1.68E−04 | — |
| 3294 | 222247_at | 2.50E−04 | — |
| 3294 | 1563154_at | 2.50E−04 | — |
| 3354 | 242024_at | 5.00E−06 | — |
| 3354 | 242117_at | 6.00E−05 | — |
| 3354 | 232119_at | 6.00E−05 | SYNPO2 |
| 3363 | 215541_s_at | 5.00E−20 | DIAPH1 |
| 3395 | 1554266_at | 1.59E−04 | — |
| 3395 | 243568_at | 2.03E−04 | — |
| 3395 | 1556339_a_at | 2.26E−04 | — |
| 3395 | 241303_x_at | 3.77E−04 | — |
| 3395 | 222213_x_at | 6.06E−04 | — |
| 3395 | 240839_at | 8.83E−04 | — |
| 3395 | 220076_at | 4.55E−05 | ANKH |
| 3395 | 1561407_at | 1.35E−05 | ARAP2 |
| 3395 | 207986_x_at | 4.88E−05 | CYB561 |
| 3395 | 232250_at | 9.45E−04 | KIAA1257 |
| 3395 | 207492_at | 0.0012 | NGLY1 |
| 3395 | 206048_at | 3.70E−05 | OVOL2 |
| 3395 | 1552809_at | 4.50E−05 | RFX4 |
| 3395 | 220791_x_at | 4.00E−06 | SCN11A |
| 3395 | 232502_at | 1.26E−04 | LOC100652735 /// LOC100653122 /// LOC728558 |
| 3395 | 1561566_at | 1.71E−04 | LOC285501 |
| 3406 | 234222_at | 0.00141 | — |
| 3406 | 1561181_at | 0.0021 | — |
| 3406 | 203967_at | 0.001087 | CDC6 |
| 3406 | 239937_at | 0.001264 | ZNF207 |
| 3407 | 215137_at | 5.50E−04 | — |
| 3465 | 1562733_at | 5.00E−04 | LINC00092 |
| 3509 | 232335_at | 0.002538 | — |
| 3517 | 232215_x_at | 4.05E−05 | PRR11 |
| 3544 | 223781_x_at | 0.00205 | ADH4 |
| 3544 | 229549_at | 0.004 | CALU |
| 3544 | 204440_at | 0.00135 | CD83 |
| 3544 | 229021_at | 0.001336 | MCTP2 |
| 3545 | 234962_at | 0.003 | — |
| 3561 | 233181_at | 1.00E−04 | — |
| 3561 | 222290_at | 1.00E−04 | OR2A20P /// OR2A9P |
| 3561 | 224006_at | 2.00E−07 | LOC100507377 |
| 3588 | 227797_x_at | 0.002 | LYRM2 |
| 3592 | 1569942_at | 0.00102 | — |
| 3592 | 236571_at | 0.00165 | — |
| 3592 | 244047_at | 0.003 | — |
| 3592 | 243646_at | 0.003 | — |
| 3592 | 1559309_at | 0.003 | MCFD2 |
| 3592 | 239462_at | 0.003 | ZNF284 |
| 3595 | 1562071_at | 4.50E−06 | — |
| 3595 | 1554599_x_at | 4.50E−06 | — |
| 3595 | 233296_x_at | 1.77E−04 | — |
| 3595 | 231873_at | 4.50E−06 | BMPR2 |
| 3595 | 232442_at | 3.01E−08 | BCAR1 |
| 3595 | 1562777_at | 4.50E−06 | ERV3-1 |
| 3595 | 1555317_at | 1.50E−05 | POLK |
| 3595 | 223176_at | 0.001336 | KCTD20 |
| 3609 | 1559509_at | 4.00E−04 | — |
| 3609 | AFFX- | 5.16E−04 | — |
| 3609 | 232778_at | 0.001133 | — |
| 3609 | 1557468_at | 0.001305 | — |
| 3609 | 236566_at | 0.00325 | — |
| 3609 | 222710_at | 0.001211 | AMIGO3 /// GMPPB |
| 3609 | 211004_s_at | 1.67E−04 | ALDH3B1 |
| 3609 | 1558756_at | 0.001285 | C2CD3 |
| 3609 | 1553162_x_at | 3.34E−04 | C19orf55 |
| 3609 | 206497_at | 0.001043 | COA1 |
| 3609 | 219290_x_at | 4.03E−04 | DAPP1 |
| 3609 | 215810_x_at | 5.12E−04 | DST |
| 3609 | 215404_x_at | 0.001024 | FGFR1 |
| 3609 | 239924_at | 4.37E−04 | GUSBP11 |
| 3609 | 213835_x_at | 0.001021 | GTPBP3 |
| 3609 | 206551_x_at | 7.92E−04 | KLHL24 |
| 3609 | 235955_at | 6.00E−04 | MARVELD2 |
| 3609 | 215560_x_at | 5.43E−04 | MTRF1L |
| 3609 | 1568986_x_at | 8.95E−04 | PIGT |
| 3609 | 221596_s_at | 3.60E−04 | RBM48 |
| 3609 | 220091_at | 1.43E−04 | SLC2A6 |
| 3609 | 1556206_at | 0.001 | LOC100652856 |
| 3609 | 220983_s_at | 0.00184 | LOC100653017 /// MIR612 /// NEAT1 |
| 3609 | 1553704_x_at | 0.001089 | ZNF791 |
| 3609 | 1553703_at | 0.001089 | ZNF791 |
| 3620 | 220113_x_at | 6.54E−04 | POLR1B |
| 3626 | 235681_at | 3.00E−05 | — |
| 3626 | 1569459_a_at | 3.00E−05 | — |
| 3626 | 241888_at | 1.00E−04 | — |
| 3626 | 1565874_at | 4.00E−04 | — |
| 3626 | 233042_at | 0.001 | — |
| 3626 | 202532_s_at | 3.00E−05 | DHFR |
| 3626 | 241727_x_at | 4.00E−04 | DHFRL1 |
| 3626 | 228012_at | 3.00E−05 | MATR3 /// SNHG4 |
| 3626 | 1562682_at | 1.00E−04 | RORA |
| 3626 | 1566932_x_at | 2.00E−06 | TFB2M |
| 3626 | 1552302_at | 3.00E−05 | TMEM106A |
| 3646 | 221120_at | 9.00E−04 | — |
| 3646 | 214718_at | 0.001 | GATAD1 |
| 3653 | 206931_at | 0.004 | ZNF141 |
| 3676 | 1566740_at | 0.001244 | PLCE1 |
| 3697 | 1562811_at | 7.83E−04 | — |
| 3697 | 202897_at | 0.002 | SIRPA |
| 3716 | 224592_x_at | 0.001251 | HP1BP3 |
| 3716 | 223871_x_at | 0.00101 | ING5 |
| 3716 | 225746_at | 0.00115 | RAB11FIP4 |
| 3716 | 1564683_at | 0.001189 | TBL3 |
| 3716 | 218050_at | 0.001006 | UFM1 |
| 3728 | 201631_s_at | 0.003 | IER3 |
| 3738 | 232621_at | 5.00E−05 | USP48 |
| 3750 | 1557334_a_at | 0.004 | FERMT1 |
| 280 | 243877_at | 3.00E−04 | — |
| 285 | 234758_at | 8.00E−05 | — |
| 3817 | 215295_at | 0.003 | DTNB |
| 3847 | 223999_at | 0.002 | PPIL2 |
| 3857 | 211775_x_at | 1.23E−04 | MGC13053 |
| 293 | 227509_x_at | 0.0025 | — |
| 293 | 206926_s_at | 0.001 | IL11 |
| 293 | 242077_x_at | 0.0021 | MB21D1 |
| 3906 | 233300_at | 2.00E−04 | — |
| 3915 | 233635_at | 0.001 | — |
| 3915 | 1559932_at | 0.001 | — |
| 3915 | 1570082_x_at | 0.004 | — |
| 3937 | 222136_x_at | 0.001202 | ZNF43 |
| 3910 | 1569673_at | 0.00335 | — |
| 3952 | 1559277_at | 4.00E−10 | FLJ35700 |
| 3953 | 241223_x_at | 2.00E−04 | — |
| 3953 | 1558474_at | 2.00E−04 | — |
| 3953 | 1558385_at | 2.00E−04 | — |
| 3953 | 216675_at | 0.002 | — |
| 3953 | 1564816_at | 2.00E−04 | C14orf178 |
| 3953 | 215600_x_at | 2.00E−04 | FBXW12 |
| 3953 | 210528_at | 2.00E−04 | MR1 |
| 3953 | 210771_at | 2.00E−04 | PPARA |
| 3953 | 233123_at | 0.002 | SLC40A1 |
| 3953 | 216775_at | 2.00E−04 | USP53 |
| 3964 | 241135_at | 0.002 | — |
| 147 | 224284_x_at | 5.04E−05 | FKSG49 |
| 3992 | 1560297_at | 2.67E−04 | — |
| 3992 | 227967_at | 5.50E−06 | TUBGCP5 |
| 3993 | 203460_s_at | 0.003 | PSEN1 |
| 4012 | 1562793_at | 3.84E−04 | — |
| 4012 | 1556831_at | 6.00E−04 | DYNC1H1 |
| 4012 | 244391_at | 4.37E−04 | TSEN2 |
| 4042 | 242171_at | 0.003 | — |
| 4064 | 233120_at | 2.47E−06 | — |
| 4064 | 216630_at | 6.93E−06 | — |
| 4064 | 1569597_at | 7.50E−04 | — |
| 4064 | 220814_at | 8.13E−04 | — |
| 4064 | 224024_at | 0.001 | ERGIC1 |
| 4064 | 1557289_s_at | 7.56E−04 | GTF2IRD2 /// GTF2IRD2B |
| 4064 | 218202_x_at | 0.001313 | MRPL44 |
| 4064 | 1552476_s_at | 5.22E−04 | PLCD3 |
| 4064 | 216957_at | 4.33E−07 | USP22 |
| 4064 | 1569270_at | 2.50E−06 | LOC100134368 |
| 4064 | 232131_at | 0.001 | LOC100506874 |
| 4083 | 224478_s_at | 4.00E−11 | C7orf50 |
| 4085 | 215831_at | 6.54E−05 | — |
| 4147 | 224052_at | 0.001 | HSFY1 /// HSFY2 |
| 4170 | 235207_at | 9.01E−04 | — |
| 4170 | 1559895_x_at | 0.001343 | — |
| 4170 | 238363_at | 0.001367 | — |
| 4170 | 242990_at | 0.0017 | — |
| 4170 | 223759_s_at | 0.003 | GSG2 |
| 4170 | 217771_at | 0.003 | GOLM1 |
| 4170 | 242512_at | 0.0017 | MYO9A |
| 4170 | 241919_x_at | 0.003 | WDR31 |
| 4187 | 1561584_at | 0.003 | — |
| 4187 | 210096_at | 0.003 | CYP4B1 |
| 4187 | 1554335_at | 0.003 | CYTH4 |
| 4187 | 1559715_at | 0.003 | LOC100507391 |
| 4188 | 208120_x_at | 4.00E−06 | FKSG49 /// LOC100506290 /// LOC100653153 |
| 4218 | 217473_x_at | 0.0028 | SLC11A1 |
| 4218 | 210422_x_at | 0.0034 | SLC11A1 |
| 4220 | 1564004_at | 0.001 | — |
| 4220 | 1569767_at | 0.001002 | — |
| 4220 | 1570138_at | 0.001067 | — |
| 4220 | 215539_at | 0.002667 | — |
| 4220 | 233779_x_at | 0.003 | — |
| 4220 | 242444_at | 9.20E−04 | C1QTNF6 |
| 4220 | 218290_at | 0.001 | PLEKHJ1 |
| 4220 | 1563465_at | 5.99E−04 | PKD1L1 |
| 4220 | 208671_at | 3.40E−04 | SERINC1 |
| 4220 | 1564208_x_at | 3.41E−04 | FLJ35390 |
| 4220 | 1569090_x_at | 6.02E−04 | FLJ35390 |
| 4220 | 1569089_a_at | 3.41E−04 | FLJ35390 /// LOC100506683 |
| 4221 | 243025_at | 6.00E−04 | — |
| 4292 | 242451_x_at | 0.001433 | RPS19 |
| 10102 | 232597_x_at | 2.00E−05 | SCAF11 |
| 4256 | 1560690_at | 0.004 | — |
| 4267 | 215053_at | 0.004 | SRCAP |
| 4268 | 218735_s_at | 0.001434 | ZNF544 |
| 4270 | 238523_at | 8.00E−05 | KLHL36 |
| 4270 | 239796_x_at | 3.00E−04 | TIRAP |
| 4323 | 207796_x_at | 8.00E−04 | KLRD1 |
| 4324 | 207756_at | 0.001044 | — |
| 4324 | 1561597_x_at | 0.001262 | — |
| 4324 | 236327_at | 0.0024 | — |
| 4324 | 220719_at | 0.0025 | — |
| 4324 | 1564820_at | 0.004 | — |
| 4324 | 1561596_at | 0.004 | — |
| 4324 | 242553_at | 0.004 | ABCC3 |
| 4324 | 1553821_at | 0.001283 | C12orf51 |
| 4331 | 217570_x_at | 3.36E−04 | — |
| 4331 | 1562541_at | 4.20E−04 | — |
| 4331 | 1561156_at | 6.67E−04 | — |
| 4331 | 231937_at | 6.67E−04 | — |
| 4331 | 1570100_at | 0.001064 | — |
| 4331 | 241816_at | 0.0012 | — |
| 4331 | 1554704_at | 6.67E−04 | ATP8B3 |
| 4331 | 1558621_at | 8.00E−06 | CABLES1 |
| 4331 | 228516_at | 1.60E−04 | CDAN1 |
| 4331 | 229082_at | 6.00E−07 | CCDC125 |
| 4331 | 238863_x_at | 4.26E−04 | COG8 |
| 4331 | 231831_at | 0.0015 | COX19 |
| 4331 | 217501_at | 0.001667 | CIAO1 |
| 4331 | 233837_at | 2.00E−04 | GGT1 |
| 4331 | 1560227_at | 4.96E−04 | GDPD1 |
| 4331 | 1557621_at | 5.62E−04 | KCP |
| 4331 | 1557197_a_at | 2.01E−04 | LGALS3 |
| 4331 | 205887_x_at | 0.00102 | MSH3 |
| 4331 | 1568974_at | 0.001028 | NHEG1 |
| 4331 | 215857_at | 3.65E−05 | NCLN |
| 4331 | 219418_at | 0.001063 | NHEJ1 /// SLC23A3 |
| 4331 | 239748_x_at | 7.00E−04 | OCIAD1 |
| 4331 | 1563690_at | 5.10E−04 | PPP4R1 |
| 4331 | 1555452_at | 2.04E−04 | RALGPS1 |
| 4331 | 226056_at | 0.001007 | ARHGAP31 |
| 4331 | 1554703_at | 6.00E−07 | ARHGEF10 |
| 4331 | 215588_x_at | 6.67E−04 | RIOK3 |
| 4331 | 208322_s_at | 5.61E−04 | ST3GAL1 |
| 4331 | 215623_x_at | 4.53E−05 | SMC4 |
| 4331 | 216310_at | 2.00E−06 | TAOK1 |
| 4331 | 233174_at | 1.50E−04 | LOC100287015 |
| 4331 | 1570350_at | 5.00E−08 | LOC100506403 /// RUNX1 |
| 4331 | 215709_at | 5.00E−08 | LOC100653079 /// PRIM2 |
| 4331 | 210065_s_at | 7.02E−04 | UPK1B |
| 4331 | 220104_at | 3.84E−05 | ZC3HAV1 |
| 4331 | 1569557_at | 5.04E−04 | ZNF248 |
| 342 | 1553909_x_at | 6.00E−04 | FAM178A |
| 345 | 1559629_at | 2.85E−04 | — |
| 345 | 231883_at | 0.001 | FBXW8 |
| 345 | 216710_x_at | 0.001322 | ZNF287 |
| 4393 | 204062_s_at | 0.004 | ULK2 |
| 347 | 242182_x_at | 2.00E−05 | — |
| 4412 | 1568914_at | 3.00E−05 | OPN5 |
| 4412 | 242617_at | 4.00E−04 | TMED8 |
| 4426 | 233319_x_at | 6.81E−04 | — |
| 4426 | 1560774_at | 7.90E−04 | — |
| 4426 | 1562358_at | 0.001216 | — |
| 4426 | 1558199_at | 0.003 | FN1 |
| 4426 | 217595_at | 0.0026 | GSPT1 |
| 4426 | 206295_at | 0.001502 | IL18 |
| 4426 | 1562338_at | 0.003 | 01-mrt |
| 4426 | 232169_x_at | 9.35E−04 | MIR4691 /// NDUFS8 |
| 4426 | 242625_at | 0.001057 | RSAD2 |
| 4426 | 218155_x_at | 0.001751 | TSR1 |
| 4447 | 242315_at | 4.00E−04 | — |
| 4447 | 231979_at | 0.001336 | — |
| 4447 | 239788_at | 0.004 | — |
| 4447 | 217588_at | 0.001336 | CATSPER2 /// CATSPER2P1 |
| 4447 | 213804_at | 0.004 | INPP5B |
| 4447 | 225073_at | 0.001 | PPHLN1 |
| 4447 | 1558407_at | 7.46E−04 | PLEKHG2 |
| 4447 | 235037_at | 0.001336 | TMEM41A |
| 4447 | 231904_at | 0.00135 | U2AF1 |
| 4447 | 1553145_at | 0.001333 | FLJ39653 |
| 4447 | 1562305_x_at | 0.004 | ZKSCAN3 |
| 4456 | 232505_at | 4.40E−04 | DCTN2 |
| 4456 | 1558727_at | 2.00E−04 | SERP2 |
| 4484 | 1565576_at | 4.00E−06 | — |
| 4484 | 224105_x_at | 1.02E−05 | — |
| 4484 | 234382_x_at | 3.67E−05 | — |
| 4484 | 1563241_at | 2.00E−04 | — |
| 4484 | 233739_at | 0.002 | — |
| 4484 | 222796_at | 3.00E−07 | ATP5J2-PTCD1 /// PTCD1 |
| 4484 | 220588_at | 1.00E−05 | BCAS4 |
| 4484 | 234938_at | 4.00E−06 | BACH1 |
| 4484 | 211464_x_at | 3.00E−07 | CASP6 |
| 4484 | 224712_x_at | 4.00E−06 | C19orf42 |
| 4484 | 207780_at | 4.00E−06 | CYLC2 |
| 4484 | 217133_x_at | 3.00E−07 | CYP2B6 |
| 4484 | 205998_x_at | 4.00E−06 | CYP3A4 |
| 4484 | 222886_at | 3.00E−07 | NSUN3 |
| 4484 | 235767_x_at | 2.10E−06 | PHAX |
| 4484 | 206021_at | 1.00E−06 | SCAND2 |
| 4484 | 1569793_at | 7.53E−05 | SLC25A18 |
| 4484 | 231923_at | 1.00E−05 | TMEM150C |
| 4484 | 231775_at | 3.33E−04 | TNFRSF10A |
| 4511 | 214589_at | 1.25E−04 | FGF12 |
| 4528 | 211781_x_at | 4.55E−04 | — |
| 4549 | 216735_x_at | 8.82E−04 | — |
| 4549 | 1559716_at | 5.10E−04 | INO80C |
| 4557 | 225609_at | 0.001 | GSR |
| 4579 | 222286_at | 0.0035 | SNAPC3 |
| 4583 | 1565837_at | 5.00E−05 | — |
| 4583 | 236765_at | 4.00E−04 | — |
| 4583 | 243895_x_at | 4.00E−04 | — |
| 4583 | 1557712_x_at | 4.50E−04 | — |
| 4583 | 1557710_at | 4.50E−04 | — |
| 4583 | 221155_x_at | 5.86E−04 | — |
| 4583 | 1560395_at | 7.03E−04 | — |
| 4583 | 217531_at | 8.63E−04 | — |
| 4583 | 216811_at | 8.92E−04 | — |
| 4583 | 234643_x_at | 0.002251 | — |
| 4583 | 1554631_at | 1.82E−04 | ATM |
| 4583 | 217141_at | 5.27E−04 | BTBD7 |
| 4583 | 221550_at | 0.001333 | COX15 |
| 4583 | 206755_at | 0.00145 | CYP2B6 |
| 4583 | 1555629_at | 0.001 | HAVCR2 |
| 4583 | 220089_at | 2.85E−04 | L2HGDH |
| 4583 | 216167_at | 4.06E−04 | LRRN2 |
| 4583 | 211768_at | 4.00E−04 | LAT2 |
| 4583 | 217584_at | 8.00E−06 | NPC1 |
| 4583 | 211697_x_at | 3.00E−04 | PNO1 |
| 4583 | 220796_x_at | 5.85E−04 | SLC35E1 |
| 4583 | 231770_x_at | 3.67E−04 | WDPCP |
| 4583 | 232911_at | 2.63E−04 | ZFP14 |
| 4583 | 1554985_at | 0.001334 | ZNF396 |
| 4586 | 231231_at | 2.00E−04 | — |
| 4586 | 228101_at | 0.002 | APBA1 |
| 4586 | 219028_at | 2.00E−04 | HIPK2 |
| 4586 | 231039_at | 0.002 | NAA30 |
| 4586 | 235263_at | 6.00E−04 | STAG3L1 /// STAG3L2 /// STAG3L3 |
| 366 | 1564773_x_at | 5.63E−04 | — |
| 366 | 217569_x_at | 8.72E−04 | — |
| 366 | 211374_x_at | 0.0013 | — |
| 366 | 1553271_at | 0.001133 | DIP2B |
| 366 | 206565_x_at | 7.65E−04 | SMA4 |
| 366 | 219846_at | 7.33E−04 | GON4L |
| 366 | 1569815_x_at | 0.001025 | STRN |
| 366 | 1569813_at | 0.001025 | STRN |
| 366 | 230623_x_at | 0.001001 | USP28 |
| 366 | 1564240_at | 4.80E−04 | LOC100130856 |
| 4620 | 1556224_a_at | 5.00E−20 | LOC155060 /// ZNF783 |
| 4621 | 216261_at | 0.001333 | ITGB3 |
| 4677 | 1569491_at | 8.40E−04 | — |
| 4677 | 1565809_x_at | 0.001002 | — |
| 4677 | 241993_x_at | 0.001703 | — |
| 4677 | 1554314_at | 3.44E−04 | C6orf141 |
| 4677 | 237475_x_at | 7.80E−04 | CCDC152 |
| 4677 | 1556235_at | 3.24E−04 | LOC100506560 /// LOC100509195 |
| 378 | 240906_at | 0.001302 | — |
| 379 | 1570054_at | 9.99E−04 | — |
| 379 | 1566243_at | 0.001007 | — |
| 379 | 1569540_at | 0.00109 | — |
| 379 | 214808_at | 0.001242 | — |
| 379 | 1566787_at | 0.001302 | — |
| 379 | 1557532_at | 0.00147 | — |
| 379 | 1561829_at | 0.001525 | — |
| 379 | 1566848_x_at | 0.002 | — |
| 379 | 244045_at | 0.002005 | — |
| 379 | 235826_at | 0.002005 | — |
| 379 | 229255_x_at | 0.002015 | — |
| 379 | 234182_at | 0.00205 | — |
| 379 | 1570587_at | 0.0022 | — |
| 379 | 241777_x_at | 0.002275 | — |
| 379 | 217662_x_at | 0.002367 | — |
| 379 | 1566518_at | 0.002367 | — |
| 379 | 209646_x_at | 7.74E−04 | ALDH1B1 |
| 379 | 1559982_s_at | 0.002005 | AKR1E2 |
| 379 | 206738_at | 7.94E−04 | APOC2 /// APOC4 /// APOC4-APOC2 |
| 379 | 207328_at | 8.93E−04 | ALOX15 |
| 379 | 201605_x_at | 0.001087 | CNN2 |
| 379 | 230379_x_at | 3.91E−04 | C2orf56 |
| 379 | 1557782_s_at | 2.80E−04 | C21orf49 |
| 379 | 215151_at | 0.001 | DOCK10 |
| 379 | 1558546_at | 0.0018 | DNASE1 |
| 379 | 232603_at | 5.27E−04 | DCDC5 |
| 379 | 233375_at | 0.00222 | EFCAB2 |
| 379 | 1568891_x_at | 0.001 | FANCD2 |
| 379 | 1568889_at | 0.001 | FANCD2 |
| 379 | 233106_at | 0.002005 | FRMD6-AS1 |
| 379 | 223887_at | 0.001493 | GPR132 |
| 379 | 215490_at | 0.002005 | IBA57 |
| 379 | 232756_at | 2.52E−04 | KALRN |
| 379 | 204449_at | 0.001433 | PDCL |
| 379 | 234971_x_at | 8.73E−04 | PLCD3 |
| 379 | 1553136_at | 0.001006 | KCTD18 |
| 379 | 201404_x_at | 2.73E−04 | PSMB2 |
| 379 | 243792_x_at | 0.001 | PTPN13 |
| 379 | 1559529_at | 0.002015 | PTK2 |
| 379 | 1555324_at | 9.94E−04 | PTK7 |
| 379 | 1554800_at | 9.33E−04 | RAB39A |
| 379 | 1559582_at | 0.00137 | RHOQ |
| 379 | 207489_at | 0.001093 | RPS2P45 |
| 379 | 219493_at | 0.001582 | SHCBP1 |
| 379 | 1558331_at | 0.00204 | SIRT2 |
| 379 | 225002_s_at | 0.001018 | SUMF2 |
| 379 | 235651_at | 0.001577 | TTC22 |
| 379 | 239593_at | 0.0016 | TMEM213 |
| 379 | 244730_x_at | 0.00205 | LOC100129195 |
| 379 | 224766_at | 0.001805 | LOC100506548 /// RPL37 |
| 379 | 210917_at | 0.002005 | YES1 |
| 379 | 1557036_at | 0.002005 | ZBTB1 |
| 379 | 1553781_at | 0.002005 | ZC3HAV1L |
| 379 | 233175_at | 0.001488 | ZNF460 |
| 379 | 205881_at | 0.001536 | ZNF74 |
| 379 | 1569277_at | 8.41E−04 | ZNF91 |
| 4737 | 243147_x_at | 5.00E−06 | — |
| 4737 | 242453_at | 2.00E−05 | — |
| 4737 | 243640_x_at | 6.00E−05 | — |
| 4737 | 1563114_at | 6.00E−05 | — |
| 4737 | 1556416_s_at | 6.00E−05 | — |
| 4737 | 1553462_at | 6.00E−05 | — |
| 4737 | 232957_x_at | 1.00E−04 | — |
| 4737 | 1563704_at | 2.00E−04 | — |
| 4737 | 1561959_x_at | 0.001 | — |
| 4737 | 239196_at | 2.55E−05 | ANKRD22 |
| 4737 | 242280_x_at | 3.00E−04 | CPEB4 |
| 4737 | 218498_s_at | 2.00E−05 | ERO1L |
| 4737 | 215942_s_at | 7.33E−04 | GTSE1 |
| 4737 | 234035_at | 0.0025 | HNRNPM |
| 4737 | 244703_x_at | 3.00E−04 | IPO9 |
| 4737 | 235321_at | 5.00E−06 | NDUFS1 |
| 4737 | 224738_x_at | 5.05E−06 | RPL7L1 |
| 4737 | 242364_x_at | 2.00E−05 | LOC100131096 |
| 4737 | 236433_at | 4.00E−07 | LOC100506713 /// MIR195 /// MIR497 /// MIR497HG |
| 4786 | 237504_at | 2.00E−20 | INTS10 |
| 4788 | 208301_at | 9.00E−06 | — |
| 4788 | 1559372_at | 9.00E−06 | — |
| 4788 | 235407_at | 3.00E−05 | — |
| 4788 | 224758_at | 1.00E−04 | C7orf73 |
| 4788 | 214088_s_at | 9.00E−06 | FUT3 |
| 4788 | 213650_at | 9.00E−06 | GOLGA8A /// GOLGA8B /// LOC100508892 |
| 4788 | 1555318_at | 7.00E−07 | HIF3A |
| 4788 | 208200_at | 3.00E−05 | IL1A |
| 4788 | 223817_at | 9.00E−06 | LRRIQ1 |
| 4788 | 238931_at | 7.00E−07 | METTL16 |
| 4788 | 215462_at | 7.00E−07 | PLK3 |
| 4788 | 215849_x_at | 3.00E−06 | TTC18 |
| 4789 | 224958_at | 0.001 | NUFIP2 |
| 4793 | 208144_s_at | 3.76E−04 | — |
| 4803 | 1561663_at | 0.00115 | — |
| 4803 | 207431_s_at | 2.50E−04 | DEGS1 |
| 4808 | 210919_at | 3.88E−04 | PHLPP1 |
| 4811 | 214967_at | 0.002 | — |
| 4811 | 239948_at | 0.002 | NUP153 |
| 4814 | 230606_at | 0.002 | LOC100287525 |
| 4816 | 1566580_at | 0.004 | — |
| 4816 | 207760_s_at | 0.004 | NCOR2 |
| 4816 | 213917_at | 0.0023 | PAX8 |
| 4865 | 207175_at | 1.67E−05 | ADIPOQ |
| 4865 | 1566150_at | 4.33E−07 | CALML4 |
| 4865 | 223248_at | 2.69E−04 | HSDL1 |
| 4883 | 1554480_a_at | 3.37E−04 | ARMC10 |
| 4883 | 202714_s_at | 0.003 | KIAA0391 |
| 4883 | 219007_at | 0.003 | NUP43 |
| 4883 | 1558712_at | 5.82E−04 | TMEM134 |
| 4883 | 238772_at | 0.003 | ZNF207 |
| 4889 | 214983_at | 0.004 | TTTY15 |
| 4906 | 215484_at | 8.00E−05 | — |
| 4906 | 1560755_at | 8.00E−05 | — |
| 4906 | 1559259_at | 8.00E−05 | — |
| 4906 | 1563204_at | 2.35E−04 | — |
| 4906 | 238286_at | 3.00E−04 | — |
| 4906 | 243537_at | 3.40E−04 | — |
| 4906 | 1561240_at | 0.001 | — |
| 4906 | 1557398_at | 0.002333 | — |
| 4906 | 231111_at | 0.003 | — |
| 4906 | 1554618_at | 8.00E−05 | AGFG2 |
| 4906 | 235459_at | 0.003 | RNF41 |
| 4906 | 224139_at | 7.71E−04 | SHANK2-AS3 |
| 4906 | 203508_at | 0.001 | TNFRSF1B |
| 4906 | 1553258_at | 8.00E−05 | FLJ30679 |
| 4906 | 243161_x_at | 3.00E−04 | ZFP42 |
| 4907 | 213791_at | 4.00E−12 | PENK |
| 4946 | 225884_s_at | 0.005 | GZF1 |
| 4950 | 233152_x_at | 1.00E−04 | — |
| 4972 | 205193_at | 7.47E−04 | MAFF |
| 4973 | 235127_at | 1.00E−13 | PMP2 |
| 5016 | 231992_x_at | 6.72E−04 | — |
| 5043 | 1560499_at | 1.69E−04 | C14orf64 |
| 415 | 216114_at | 0.004 | NCKIPSD |
| 416 | 233757_x_at | 3.24E−04 | — |
| 5114 | 1565740_at | 1.00E−05 | — |
| 5114 | 211050_x_at | 7.64E−04 | LOC100134822 /// LOC100288069 /// LOC100653347 |
| 5114 | 1569108_a_at | 0.001 | ZNF589 |
| 5117 | 1560696_x_at | 6.77E−04 | QTRTD1 |
| 5117 | 1560695_at | 6.77E−04 | QTRTD1 |
| 5149 | 234346_x_at | 3.50E−06 | — |
| 5149 | 206296_x_at | 5.51E−05 | MAP4K1 |
| 5149 | 1569856_at | 2.41E−04 | TPP2 |
| 5212 | 1562010_x_at | 0.003201 | — |
| 5212 | 1559452_a_at | 0.003331 | — |
| 5212 | 241593_x_at | 0.003624 | — |
| 5212 | 1569345_at | 0.003715 | — |
| 5212 | 1569341_at | 0.004101 | — |
| 5212 | 242266_x_at | 0.004218 | — |
| 5212 | 240988_x_at | 0.004283 | — |
| 5212 | 233805_at | 0.004582 | — |
| 5212 | 1562313_at | 0.003193 | BCORP1 |
| 5212 | 1569554_at | 0.002346 | ESR2 |
| 5212 | 211740_at | 0.004 | ICA1 |
| 5212 | 238600_at | 0.003665 | JAKMIP1 |
| 5212 | 224673_at | 0.004 | LENG8 |
| 5212 | 1554589_at | 0.004 | LENG9 |
| 5212 | 244338_at | 0.003665 | LDLRAD3 |
| 5212 | 216436_at | 0.003421 | PIK3R4 |
| 5212 | 1554710_at | 0.00265 | KCNMB1 |
| 5212 | 235964_x_at | 0.003784 | SAMHD1 |
| 5212 | 235529_x_at | 0.003977 | SAMHD1 |
| 5212 | 219620_x_at | 0.002974 | TOR4A |
| 5212 | 233589_x_at | 0.00335 | TOR4A |
| 5212 | 222976_s_at | 0.004333 | TPM3 |
| 5212 | 238901_at | 0.00454 | LOC100505633 |
| 5212 | 1561442_at | 0.004309 | LOC283585 |
| 5212 | 1563978_at | 0.002833 | LOC728690 |
| 5212 | 203604_at | 0.005 | ZNF516 |
| 5216 | 208185_x_at | 0.001018 | — |
| 5314 | 1556678_a_at | 2.10E−04 | — |
| 5316 | 1560798_at | 0.001528 | — |
| 5320 | 220732_at | 0.001025 | PREX2 |
| 5328 | 1560543_at | 0.001334 | GRK4 |
| 5336 | 243189_at | 1.00E−05 | NRF1 |
| 5345 | 244891_x_at | 1.50E−05 | — |
| 5345 | 1555205_at | 0.001333 | — |
| 5345 | 217253_at | 7.52E−04 | SH3BP2 |
| 5360 | 244146_at | 0.003 | DTWD1 |
| 5381 | 1560662_s_at | 4.80E−05 | WHAMMP2 /// WHAMMP3 |
| 5382 | 200775_s_at | 1.00E−12 | HNRNPK /// MIR7-1 |
| 439 | 221251_x_at | 0.005 | INO80B /// INO80B-WBP1 |
| 5409 | 236628_at | 1.70E−04 | — |
| 5409 | 232997_at | 0.001001 | — |
| 5409 | 1562236_at | 1.80E−04 | KAT6B |
| 5409 | 216509_x_at | 0.002 | MLLT10 |
| 5409 | 216506_x_at | 0.002 | MLLT10 |
| 5409 | 1563051_at | 0.00101 | OSBP |
| 5409 | 226120_at | 5.00E−04 | TTC8 |
| 5411 | 214594_x_at | 7.93E−04 | ATP8B1 |
| 5416 | 234773_x_at | 5.33E−05 | — |
| 5416 | 215965_at | 2.00E−04 | — |
| 5416 | 217105_at | 7.50E−04 | — |
| 5416 | 217102_at | 7.50E−04 | — |
| 5416 | 217446_x_at | 9.00E−04 | — |
| 5416 | 235650_at | 1.01E−04 | CDHR3 /// LOC100652903 |
| 5416 | 221064_s_at | 6.00E−04 | UNKL |
| 5430 | 232896_at | 8.00E−05 | ERBB21P |
| 5502 | 212373_at | 5.00E−04 | FEM1B |
| 5523 | 217682_at | 1.65E−04 | — |
| 5526 | 234789_at | 5.50E−04 | — |
| 5526 | 224605_at | 6.00E−04 | C4orf3 |
| 5526 | 232768_at | 2.00E−04 | CCNB2 |
| 5526 | 237866_at | 6.00E−04 | PID1 |
| 5526 | 1569446_x_at | 0.002 | LOC100287576 /// LOC100506454 |
| 5526 | 228346_at | 4.50E−04 | ZNF844 |
| 5543 | 231048_at | 0.003 | — |
| 5543 | 233132_at | 0.003 | LOC96610 |
| 9457 | 1570244_at | 2.00E−06 | — |
| 9457 | 1570476_at | 6.00E−06 | — |
| 9457 | 233407_at | 6.67E−05 | — |
| 9457 | 1561662_at | 2.33E−04 | — |
| 9457 | 1570335_at | 2.37E−04 | — |
| 9457 | 242646_at | 2.47E−04 | — |
| 9457 | 242476_at | 3.00E−04 | — |
| 9457 | 240535_at | 6.68E−04 | — |
| 9457 | 217443_at | 6.68E−04 | — |
| 9457 | 244788_at | 0.001 | — |
| 9457 | 232544_at | 0.002001 | — |
| 9457 | 225065_x_at | 8.00E−05 | C17orf76-AS1 /// SNORD49A /// SNORD49B /// SNORD65 |
| 9457 | 201633_s_at | 3.00E−04 | CYB5B |
| 9457 | 201789_at | 0.003 | DHRS7 |
| 9457 | 233089_at | 2.40E−05 | QRSL1 |
| 9457 | 204544_at | 0.001 | HPS5 |
| 9457 | 211732_x_at | 6.67E−04 | HNMT |
| 9457 | 232844_at | 2.00E−06 | IFT140 |
| 9457 | 242778_at | 0.001 | LPXN |
| 9457 | 1562142_at | 2.34E−04 | SKIV2L2 |
| 9457 | 226662_at | 2.35E−04 | STX17 |
| 9457 | 201746_at | 2.87E−04 | TP53 |
| 9457 | 1554777_at | 0.001 | ZFP42 |
| 9460 | 211590_x_at | 1.00E−09 | TBXA2R |
| 471 | 206907_at | 0.002 | TNFSF9 |
| 9463 | 239227_at | 3.00E−04 | — |
| 9463 | 1569311_at | 3.00E−04 | — |
| 9463 | 1565846_at | 3.00E−04 | — |
| 9463 | 1557155_a_at | 3.00E−04 | — |
| 9463 | 239649_at | 0.001 | — |
| 9463 | 1560346_at | 0.001 | — |
| 9463 | 239744_at | 0.004 | — |
| 9463 | 244748_at | 0.004 | — |
| 9463 | 243620_at | 0.004 | — |
| 9463 | 242747_at | 0.004 | — |
| 9463 | 240791_at | 0.004 | — |
| 9463 | 240541_at | 0.004 | — |
| 9463 | 237398_at | 0.004 | — |
| 9463 | 1562084_at | 0.004 | — |
| 9463 | 203741_s_at | 9.00E−05 | ADCY7 |
| 9463 | 222608_s_at | 3.00E−04 | ANLN |
| 9463 | 216120_s_at | 0.004 | ATP2B2 |
| 9463 | 242197_x_at | 3.00E−04 | CD36 |
| 9463 | 211173_at | 0.004 | CCKAR |
| 9463 | 218182_s_at | 0.004 | CLDN1 |
| 9463 | 205223_at | 3.00E−04 | DEPDC5 |
| 9463 | 230869_at | 0.004 | FAM155A |
| 9463 | 209841_s_at | 0.004 | LRRN3 |
| 9463 | 203062_s_at | 0.004 | MDC1 |
| 9463 | 215880_at | 0.004 | NAGLU |
| 9463 | 204621_s_at | 0.004 | NR4A2 |
| 9463 | 224892_at | 3.00E−04 | PLDN |
| 9463 | 216254_at | 3.00E−04 | PARVB |
| 9463 | 1568764_x_at | 3.00E−04 | LOC728613 /// PDCD6 |
| 9463 | 1568762_at | 3.00E−04 | LOC728613 /// PDCD6 |
| 9463 | 231851_at | 0.001 | RAVER2 |
| 9463 | 238430_x_at | 3.00E−04 | SLFN5 |
| 9463 | 207570_at | 0.004 | SHOX |
| 9463 | 214925_s_at | 0.004 | SPTAN1 |
| 9463 | 227205_at | 0.001 | TAF1 |
| 9463 | 1556154_a_at | 0.004 | MGC23284 |
| 9463 | 1564360_a_at | 0.002 | LOC339260 |
| 9463 | 1559276_at | 3.00E−04 | LOC728606 |
| 9463 | 201244_s_at | 9.00E−05 | RAF1 |
| 9475 | 217533_x_at | 1.00E−04 | — |
| 9475 | 1566725_at | 9.74E−04 | — |
| 9501 | 233390_at | 3.00E−04 | — |
| 9501 | 1562145_at | 5.00E−04 | — |
| 9501 | 211164_at | 4.70E−05 | EPHA3 |
| 9512 | 210259_s_at | 0.004 | DLX4 |
| 9515 | 217713_x_at | 2.14E−04 | — |
| 9515 | 207598_x_at | 3.00E−05 | XRCC2 |
| 9556 | 215615_x_at | 1.00E−05 | — |
| 9556 | 1563329_s_at | 0.001122 | — |
| 9556 | 1566798_at | 0.001333 | — |
| 9556 | 221540_x_at | 4.50E−06 | GTF2H2 /// GTF2H2B /// GTF2H2C /// GTF2H2D |
| 9556 | 207092_at | 0.001002 | LEP |
| 9556 | 232190_x_at | 2.52E−04 | LOC100133445 /// LOC115110 |
| 9573 | 1563147_at | 0.001002 | — |
| 9573 | 216166_at | 0.001075 | — |
| 9573 | 206936_x_at | 0.001456 | — |
| 9573 | 1570361_a_at | 0.001673 | — |
| 9573 | 222517_at | 5.64E−04 | AP3M1 |
| 9573 | 214707_x_at | 7.57E−04 | ALMS1 |
| 9573 | 218056_at | 0.001312 | BFAR |
| 9573 | 234094_x_at | 0.00139 | DNAJC21 |
| 9573 | 220838_at | 9.73E−04 | EXD3 |
| 9573 | 205973_at | 6.22E−04 | FEZ1 |
| 9573 | 222187_x_at | 8.00E−04 | G3EP1 |
| 9573 | 1555685_at | 6.38E−04 | H6PD |
| 9573 | 222521_x_at | 0.001043 | NDUFC2 /// NDUFC2-KCTD14 |
| 9573 | 205636_at | 0.001 | SH3GL3 |
| 483 | 217152_at | 3.00E−04 | — |
| 483 | 1559566_at | 4.36E−04 | FBXO42 |
| 483 | 216115_at | 0.0019 | NF1 |
| 9597 | 1560332_at | 0.004 | — |
| 9598 | 233806_at | 2.00E−04 | — |
| 9602 | 1566162_x_at | 5.00E−04 | — |
| 9602 | 1566161_at | 5.00E−04 | — |
| 9602 | 220847_x_at | 2.50E−04 | ZNF221 |
| 9628 | 236240_at | 0.001022 | C4orf29 |
| 9630 | 1566527_at | 2.00E−06 | — |
| 9630 | 1570272_at | 7.00E−06 | — |
| 9630 | 243203_at | 2.15E−04 | — |
| 9630 | 1562416_at | 3.34E−04 | — |
| 9630 | 233904_at | 3.50E−04 | — |
| 9630 | 238743_at | 3.90E−04 | — |
| 9630 | 1570165_at | 8.00E−04 | — |
| 9630 | 239251_at | 0.001 | — |
| 9630 | 242347_at | 0.001234 | — |
| 9630 | 1555114_at | 5.00E−04 | ATP6V0A2 |
| 9630 | 213020_at | 0.001567 | GOSR1 |
| 9630 | 236906_x_at | 3.50E−04 | IPO5 |
| 9630 | 206341_at | 3.50E−04 | IL2RA |
| 9630 | 1560558_at | 2.15E−04 | INIP |
| 9630 | 232921_at | 2.00E−05 | KIAA1549 |
| 9630 | 215063_x_at | 3.50E−04 | LRRC40 |
| 9630 | 231876_at | 1.75E−04 | TRIM56 |
| 9630 | 1553335_x_at | 0.001233 | LOC285696 |
| 9630 | 1563637_at | 8.00E−06 | LOC729652 |
| 9647 | 238121_at | 0.003 | GK5 |
| 492 | 232811_x_at | 5.26E−04 | PRICKLE1 |
| 9707 | 209109_s_at | 5.00E−21 | TSPAN6 |
| 9718 | 1570412_at | 0.001 | — |
| 9740 | 220339_s_at | 0.003 | TPSG1 |
| 9750 | 233412_x_at | 0.002039 | — |
| 9780 | 1560033_at | 5.00E−04 | MCCC2 |
| 504 | 204713_s_at | 1.00E−07 | F5 |
| 505 | 209913_x_at | 0.001506 | AP5Z1 |
| 9814 | 1566862_at | 0.002 | — |
| 9816 | 241376_at | 0.003 | — |
| 9831 | 221152_at | 6.00E−07 | COL8A1 |
| 9840 | 234394_at | 4.00E−08 | ZNF124 |
| 9924 | 1554503_a_at | 3.51E−04 | OSCAR |
| 521 | 200845_s_at | 1.00E−07 | PRDX6 |

^{A}shows the SEQ ID NO;
^{B}Affymetrix probe ID that harbors significant identity with the spacers from (A);
^{C}shows the significance of the identity;
^{D}shows the transcript that the Affymetrix probe detects

[0064] For the human CRISPR repeats this number exceeded 3000 (Table 7).

TABLE 7
Affymetrix probes harbor significant identity with the human
CRISPR repeats.

| SEQ | | | |
|---|---|---|---|
| ID NO^{A} | Probe Set ID^{B} | E-Value^{C} | Gene Target Symbol^{D} |
| 542 | 1566202_at | 5.00E−07 | — |
| 542 | 232712_at | 1.33E−04 | — |
| 559 | 240025_x_at | 8.01E−04 | — |
| 559 | 242453_at | 9.64E−04 | — |
| 559 | 240804_at | 5.59E−04 | — |
| 559 | 1566096_x_at | 2.10E−04 | — |
| 559 | 1561205_at | 2.60E−05 | — |
| 559 | 1559530_at | 2.83E−04 | — |
| 559 | 243310_at | 2.00E−04 | — |
| 559 | 244045_at | 2.06E−04 | — |
| 559 | 207479_at | 1.92E−04 | — |
| 559 | 1560297_at | 5.73E−04 | — |
| 559 | 216773_at | 0.0023 | — |
| 559 | 243537_at | 0.00166 | — |
| 559 | 241993_x_at | 6.80E−04 | — |
| 559 | 241737_x_at | 1.34E−04 | — |
| 559 | 233519_at | 1.99E−04 | — |
| 559 | 1570335_at | 5.06E−04 | — |
| 559 | 1566503_at | 1.65E−04 | — |
| 559 | 1566424_at | 2.53E−04 | — |
| 559 | 1560755_at | 1.58E−04 | — |
| 559 | 241686_x_at | 9.51E−04 | — |
| 559 | 233875_at | 2.19E−04 | — |
| 559 | 1559629_at | 5.02E−04 | — |
| 559 | 242990_at | 0.00168 | — |
| 560 | 1560199_x_at | 3.00E−06 | — |
| 573 | 217137_x_at | 4.80E−06 | — |
| 573 | 233108_at | 7.67E−06 | — |
| 619 | 241391_at | 0.003 | — |
| 663 | 1563204_at | 1.28E−04 | — |
| 663 | 231111_at | 0.00101 | — |
| 663 | 1557398_at | 0.00134 | — |
| 663 | 1561240_at | 5.40E−04 | — |
| 663 | 232493_at | 0.001 | — |
| 663 | 233981_at | 0.001 | — |
| 663 | 1570151_at | 0.001 | — |
| 663 | 237600_at | 8.00E−05 | — |
| 663 | 234505_at | 0.003 | — |
| 716 | 243646_at | 0.001 | — |
| 720 | 242310_at | 1.00E−06 | — |
| 738 | 239815_at | 0.001367 | — |
| 762 | 1563480_at | 2.00E−06 | — |
| 790 | 244714_at | 6.70E−04 | — |
| 790 | 233473_x_at | 3.00E−05 | — |
| 790 | 1561956_at | 6.70E−06 | — |
| 790 | 1561606_at | 6.53E−04 | — |
| 790 | 231674_at | 1.00E−04 | — |
| 796 | 216290_x_at | 1.98E−04 | — |
| 796 | 216163_at | 8.86E−05 | — |
| 796 | 235207_at | 1.35E−04 | — |
| 796 | 231979_at | 6.06E−05 | — |
| 796 | 227509_x_at | 1.61E−04 | — |
| 796 | 1569732_at | 3.00E−05 | — |
| 796 | 1566541_at | 8.73E−06 | — |
| 796 | 1566485_at | 5.60E−05 | — |
| 796 | 1562010_x_at | 8.55E−05 | — |
| 796 | 1560576_at | 1.62E−05 | — |
| 796 | 1558275_at | 5.23E−04 | — |
| 796 | 1557581_x_at | 8.92E−05 | — |
| 796 | 1557580_at | 3.01E−05 | — |
| 796 | 233419_at | 2.33E−04 | — |
| 796 | 232872_at | 2.33E−06 | — |
| 796 | 232468_at | 1.19E−04 | — |
| 796 | 237402_at | 3.97E−06 | — |
| 796 | 215360_at | 3.44E−05 | — |
| 796 | 243846_x_at | 1.04E−06 | — |
| 796 | 211374_x_at | 4.29E−05 | — |
| 796 | 241223_x_at | 3.74E−04 | — |
| 796 | 216756_at | 1.65E−06 | — |
| 796 | 1561597_x_at | 7.58E−05 | — |
| 796 | 1561596_at | 1.87E−05 | — |
| 796 | 1563721_at | 4.92E−04 | — |
| 796 | 238812_at | 2.37E−05 | — |
| 796 | 1559724_at | 5.82E−04 | — |
| 808 | 214019_at | 7.63E−04 | — |
| 5679 | 241593_x_at | 8.12E−04 | — |
| 6071 | 1558714_at | 3.00E−04 | — |
| 6113 | 1566425_at | 1.00E−06 | — |
| 6173 | 1566162_x_at | 0.002001 | — |
| 6173 | 1566161_at | 0.002001 | — |
| 6184 | 1558489_at | 0.0013 | — |
| 6217 | 1570579_at | 4.00E−06 | — |
| 6217 | 1556250_at | 5.17E−06 | — |
| 6217 | 1570099_at | 2.00E−04 | — |
| 6249 | 1556658_a_at | 2.58E−04 | — |
| 6249 | 237768_x_at | 4.61E−04 | — |
| 6249 | 216767_at | 2.72E−04 | — |
| 6249 | 236839_at | 3.78E−04 | — |
| 6249 | 1563147_at | 4.79E−04 | — |
| 6249 | 1554266_at | 7.88E−04 | — |
| 6249 | 215995_x_at | 3.10E−04 | — |
| 6249 | 241888_at | 0.001955 | — |
| 6249 | 217482_at | 9.56E−04 | — |
| 6249 | 238363_at | 0.001254 | — |
| 6249 | 216151_at | 9.63E−04 | — |
| 6249 | 1569459_a_at | 0.0019 | — |
| 6249 | 1561653_at | 0.002333 | — |
| 6249 | 1559895_x_at | 0.001007 | — |
| 6251 | 1555205_at | 1.30E−04 | — |
| 6251 | 1570308_at | 3.91E−04 | — |
| 6251 | 1566798_at | 4.80E−06 | — |
| 6251 | 1562673_at | 2.11E−04 | — |
| 6251 | 1560563_at | 9.34E−05 | — |
| 6251 | 1554599_x_at | 3.72E−05 | — |
| 6251 | 232754_at | 5.39E−05 | — |
| 6251 | 207470_at | 3.20E−04 | — |
| 6251 | 1565976_at | 1.84E−04 | — |
| 6251 | 215628_x_at | 1.89E−04 | — |
| 6251 | 242347_at | 1.57E−04 | — |
| 6251 | 232338_at | 2.10E−04 | — |
| 6251 | 1559229_at | 4.31E−05 | — |
| 6251 | 220583_at | 1.64E−04 | — |
| 6251 | 233783_at | 2.53E−05 | — |
| 5730 | 234019_at | 6.00E−04 | — |
| 5731 | 242675_x_at | 0.002 | — |
| 5731 | 1569805_at | 0.00101 | — |
| 5731 | 1560082_at | 8.35E−04 | — |
| 5731 | 215484_at | 0.002 | — |
| 5732 | 232991_at | 1.16E−04 | — |
| 5732 | 1569784_at | 3.08E−04 | — |
| 5732 | 1568892_at | 2.92E−04 | — |
| 5733 | 234201_x_at | 0.001358 | — |
| 6305 | 224549_x_at | 1.37E−07 | — |
| 6310 | 235274_at | 1.98E−04 | — |
| 6310 | 1556678_a_at | 0.001178 | — |
| 6310 | 243216_x_at | 0.00115 | — |
| 6310 | 1562677_at | 0.002 | — |
| 5736 | 216793_x_at | 4.07E−04 | — |
| 5736 | 216229_x_at | 1.30E−04 | — |
| 5736 | 234266_at | 4.01E−04 | — |
| 5736 | 233440_at | 9.49E−05 | — |
| 5736 | 211411_at | 1.32E−04 | — |
| 5736 | 1570432_at | 5.63E−05 | — |
| 5736 | 1566597_at | 6.34E−05 | — |
| 5736 | 1559682_at | 6.31E−04 | — |
| 5736 | 1569948_at | 1.33E−04 | — |
| 5736 | 1556339_a_at | 5.14E−05 | — |
| 5736 | 221071_at | 4.46E−04 | — |
| 5736 | 216179_x_at | 2.20E−04 | — |
| 5736 | 233319_x_at | 2.52E−04 | — |
| 5736 | 232580_x_at | 2.34E−04 | — |
| 5736 | 1565821_at | 3.06E−04 | — |
| 5736 | 1565820_x_at | 3.06E−04 | — |
| 5736 | 1565819_at | 3.06E−04 | — |
| 5736 | 1559508_at | 8.23E−05 | — |
| 5736 | 216187_x_at | 2.51E−04 | — |
| 5736 | 217446_x_at | 3.34E−04 | — |
| 5736 | 241724_x_at | 2.04E−04 | — |
| 5736 | 217537_x_at | 1.05E−04 | — |
| 5736 | 215868_x_at | 1.39E−04 | — |
| 5736 | 215753_at | 4.46E−04 | — |
| 5736 | 215445_x_at | 2.61E−04 | — |
| 5736 | 234190_at | 1.74E−04 | — |
| 5736 | 233431_x_at | 4.89E−05 | — |
| 5736 | 208246_x_at | 2.97E−04 | — |
| 5736 | 1570054_at | 2.70E−04 | — |
| 5736 | 1566696_at | 1.25E−04 | — |
| 5736 | 1566538_at | 5.19E−05 | — |
| 5736 | 1564449_at | 2.83E−04 | — |
| 5736 | 1561139_at | 2.70E−04 | — |
| 5736 | 1557774_at | 1.25E−04 | — |
| 5736 | 217571_at | 2.27E−04 | — |
| 5736 | 217708_x_at | 4.73E−04 | — |
| 5736 | 216735_x_at | 1.87E−04 | — |
| 5736 | 220689_at | 5.55E−04 | — |
| 5736 | 217703_x_at | 1.41E−04 | — |
| 5736 | 1569231_x_at | 2.13E−04 | — |
| 5736 | 1569230_at | 2.13E−04 | — |
| 5736 | 215907_at | 3.82E−04 | — |
| 6358 | 232670_at | 6.88E−06 | — |
| 6358 | 224098_at | 1.33E−06 | — |
| 6375 | 1558402_at | 0.001423 | — |
| 6385 | 1561234_at | 0.001456 | — |
| 6398 | 224183_at | 5.15E−05 | — |
| 6440 | 212498_at | 0.002 | — |
| 6442 | 234758_at | 0.002 | — |
| 6456 | 237676_at | 0.00185 | — |
| 6456 | 1561341_at | 0.003 | — |
| 5752 | 237458_at | 2.00E−04 | — |
| 6493 | 234582_at | 0.003 | — |
| 6508 | 1566957_at | 5.73E−05 | — |
| 6515 | 1569182_at | 1.82E−04 | — |
| 6520 | 1569999_at | 6.52E−04 | — |
| 6568 | 224114_at | 0.002 | — |
| 6610 | 1556814_a_at | 4.00E−07 | — |
| 6619 | 202015_x_at | 4.00E−07 | — |
| 6619 | 1553882_at | 4.00E−07 | — |
| 6634 | 1566183_at | 4.33E−04 | — |
| 6647 | 1564430_at | 0.00125 | — |
| 6659 | 244866_at | 0.002 | — |
| 6673 | 1557751_at | 0.001067 | — |
| 6673 | 1559436_x_at | 4.00E−05 | — |
| 6675 | 1570165_at | 3.60E−04 | — |
| 6675 | 1565567_at | 4.00E−05 | — |
| 6675 | 1565566_a_at | 4.00E−05 | — |
| 6675 | 238826_x_at | 0.00125 | — |
| 6675 | 233291_at | 7.00E−05 | — |
| 6690 | 229212_at | 4.00E−05 | — |
| 6740 | 243350_at | 6.00E−04 | — |
| 6740 | 1569615_at | 0.002 | — |
| 6772 | 234675_x_at | 3.67E−05 | — |
| 6772 | 220837_at | 0.00125 | — |
| 6811 | 1556327_a_at | 5.62E−06 | — |
| 6811 | 216155_at | 3.11E−05 | — |
| 6811 | 1562962_at | 2.76E−05 | — |
| 6811 | 1562853_x_at | 2.45E−04 | — |
| 6811 | 1562852_at | 2.45E−04 | — |
| 6811 | 1570103_at | 3.53E−05 | — |
| 6811 | 1569542_at | 4.48E−04 | — |
| 6811 | 1560129_at | 3.29E−04 | — |
| 6844 | 215397_x_at | 1.18E−04 | — |
| 6846 | 242795_at | 1.80E−04 | — |
| 6846 | 1568983_a_at | 0.001 | — |
| 6860 | 237187_at | 1.00E−08 | — |
| 5797 | 233658_at | 1.00E−12 | — |
| 6914 | 1564984_at | 1.00E−07 | — |
| 6922 | 242126_at | 1.00E−04 | — |
| 6953 | 234677_at | 9.00E−08 | — |
| 6953 | 1563061_at | 9.00E−08 | — |
| 6953 | 238645_at | 3.50E−04 | — |
| 7009 | 233310_at | 1.18E−04 | — |
| 7009 | 1565857_at | 5.33E−06 | — |
| 7009 | 1564212_at | 3.00E−06 | — |
| 7009 | 220916_at | 4.00E−05 | — |
| 7009 | 1561625_at | 4.00E−05 | — |
| 7009 | 1565621_at | 5.00E−04 | — |
| 7021 | 238881_at | 5.00E−04 | — |
| 7078 | 1570635_at | 5.04E−15 | — |
| 7103 | 222271_at | 0.002 | — |
| 7152 | 234779_at | 4.27E−08 | — |
| 7152 | 234755_x_at | 4.27E−08 | — |
| 5822 | 242315_at | 2.50E−04 | — |
| 5822 | 1567045_at | 6.00E−04 | — |
| 7216 | 1569738_at | 0.003 | — |
| 7267 | 217698_at | 2.77E−04 | — |
| 7268 | 1560511_at | 0.0015 | — |
| 5873 | 1562384_at | 2.83E−04 | — |
| 5873 | 1569474_at | 0.001073 | — |
| 5873 | 244010_at | 8.50E−06 | — |
| 5873 | 224119_at | 3.30E−05 | — |
| 5873 | 1566043_at | 1.19E−04 | — |
| 5873 | 1559843_s_at | 2.64E−06 | — |
| 5873 | 232144_at | 3.48E−04 | — |
| 5873 | 1562752_at | 3.10E−05 | — |
| 5873 | 216337_at | 4.36E−05 | — |
| 7313 | 242371_x_at | 0.002013 | — |
| 7313 | 1570476_at | 5.14E−04 | — |
| 7313 | 1559434_at | 4.29E−04 | — |
| 7313 | 1566787_at | 5.46E−04 | — |
| 7331 | 1560395_at | 0.001015 | — |
| 7331 | 236566_at | 7.29E−04 | — |
| 7331 | 216527_at | 5.52E−04 | — |
| 7331 | 1561959_x_at | 0.001021 | — |
| 7349 | 240695_at | 1.00E−04 | — |
| 7365 | 236072_at | 0.005 | — |
| 7397 | 1563277_at | 0.003 | — |
| 7421 | 234596_at | 4.30E−04 | — |
| 7421 | 216118_at | 3.82E−04 | — |
| 7421 | 1563026_at | 3.15E−04 | — |
| 7421 | 1558208_at | 1.35E−04 | — |
| 7421 | 1566481_at | 4.23E−04 | — |
| 7421 | 1561033_at | 3.19E−04 | — |
| 5851 | 1570630_at | 1.00E−05 | — |
| 7426 | 243246_at | 5.00E−21 | — |
| 7429 | 1563187_at | 0.00185 | — |
| 7472 | 1569345_at | 0.0014 | — |
| 7484 | 1556903_at | 0.002 | — |
| 5610 | 233806_at | 1.55E−04 | — |
| 5610 | 1561749_at | 7.18E−04 | — |
| 5858 | 232877_at | 0.001 | — |
| 7501 | 207750_at | 0.002 | — |
| 7564 | 242080_at | 5.10E−04 | — |
| 7564 | 242805_at | 2.10E−04 | — |
| 7564 | 216169_at | 3.00E−04 | — |
| 7565 | 242731_x_at | 5.90E−04 | — |
| 7566 | 205800_at | 0.002 | — |
| 7567 | 1565788_at | 2.89E−04 | — |
| 7567 | 215965_at | 1.88E−04 | — |
| 7567 | 217591_at | 4.71E−04 | — |
| 5865 | 1566727_at | 0.003 | — |
| 5865 | 1564007_at | 0.003 | — |
| 7577 | 216006_at | 8.00E−06 | — |
| 7577 | 242374_at | 5.00E−04 | — |
| 10116 | 242202_at | 3.00E−07 | — |
| 10019 | 240698_s_at | 3.38E−04 | — |
| 10019 | 239790_s_at | 3.38E−04 | — |
| 10019 | 215862_at | 2.45E−04 | — |
| 10019 | 1565596_at | 8.10E−04 | — |
| 10019 | 1564155_x_at | 3.60E−04 | — |
| 10019 | 1564154_at | 3.60E−04 | — |
| 10019 | 1561704_at | 4.61E−05 | — |
| 10019 | 239817_at | 1.00E−05 | — |
| 10019 | 217662_x_at | 5.26E−05 | — |
| 10019 | 240906_at | 1.85E−04 | — |
| 10019 | 235826_at | 6.36E−04 | — |
| 10019 | 1557532_at | 5.86E−04 | — |
| 10019 | 1570587_at | 0.0014 | — |
| 10019 | 1563210_at | 4.50E−04 | — |
| 10019 | 240160_x_at | 0.0013 | — |
| 5969 | 1561400_at | 6.80E−06 | — |
| 5969 | 1565896_at | 7.00E−04 | — |
| 5969 | 217425_at | 0.00185 | — |
| 7645 | 233596_at | 1.24E−04 | — |
| 7645 | 1561104_at | 3.33E−04 | — |
| 7645 | 238918_at | 6.50E−04 | — |
| 7645 | 1560118_at | 8.80E−04 | — |
| 7649 | 1564763_at | 1.00E−05 | — |
| 7671 | 1569892_at | 6.00E−06 | — |
| 7675 | 207751_at | 1.00E−04 | — |
| 7699 | 241508_at | 6.00E−04 | — |
| 7771 | 211781_x_at | 2.99E−04 | — |
| 7815 | 241777_x_at | 1.33E−04 | — |
| 7815 | 243763_x_at | 4.67E−05 | — |
| 7815 | 242741_x_at | 6.00E−05 | — |
| 7815 | 239892_at | 3.00E−06 | — |
| 7815 | 223872_at | 4.00E−05 | — |
| 5891 | 243682_at | 5.00E−06 | — |
| 5891 | 239804_at | 2.00E−04 | — |
| 5891 | 238286_at | 1.04E−04 | — |
| 5891 | 1569841_x_at | 0.001825 | — |
| 5891 | 1569840_at | 0.00165 | — |
| 5895 | 1559932_at | 1.20E−05 | — |
| 7944 | 235803_at | 0.00152 | — |
| 7944 | 216165_at | 5.50E−04 | — |
| 7964 | 1563460_at | 1.00E−05 | — |
| 7964 | 234531_at | 0.00252 | — |
| 7964 | 1556749_at | 5.00E−04 | — |
| 7980 | 1560557_at | 5.00E−04 | — |
| 7980 | 232757_at | 0.002 | — |
| 7984 | 215504_x_at | 4.00E−05 | — |
| 7984 | 216146_at | 2.18E−05 | — |
| 7984 | 215674_at | 1.08E−04 | — |
| 7984 | 235393_at | 8.33E−05 | — |
| 7984 | 1561662_at | 5.00E−04 | — |
| 7984 | 1570290_at | 5.13E−04 | — |
| 7991 | 239235_at | 0.001313 | — |
| 7992 | 222214_at | 2.08E−04 | — |
| 7992 | 243249_at | 2.90E−04 | — |
| 7992 | 217619_x_at | 3.01E−04 | — |
| 7992 | 1565825_at | 0.00144 | — |
| 7992 | 232029_at | 0.001231 | — |
| 7992 | 1566778_at | 0.00272 | — |
| 7992 | 208154_at | 0.001252 | — |
| 7992 | 217569_x_at | 6.52E−04 | — |
| 7992 | 1566609_at | 9.03E−04 | — |
| 8002 | 237849_at | 1.00E−05 | — |
| 8010 | 232540_x_at | 7.33E−04 | — |
| 8015 | 232800_at | 5.33E−04 | — |
| 8015 | 215861_at | 7.68E−04 | — |
| 8015 | 1555014_x_at | 3.97E−04 | — |
| 8015 | 1569192_at | 1.20E−04 | — |
| 8015 | 242383_at | 1.00E−04 | — |
| 8016 | 1559780_at | 5.00E−04 | — |
| 8083 | 216152_at | 4.00E−04 | — |
| 8132 | 234135_x_at | 0.001735 | — |
| 8147 | 1565692_at | 2.87E−04 | — |
| 8147 | 1556442_x_at | 4.21E−04 | — |
| 8147 | 233622_x_at | 4.19E−05 | — |
| 8147 | 233270_x_at | 0.001256 | — |
| 8147 | 1566501_at | 4.00E−05 | — |
| 8156 | 233239_at | 4.45E−04 | — |
| 8156 | 217105_at | 4.96E−04 | — |
| 8156 | 217102_at | 4.96E−04 | — |
| 8156 | 1566146_x_at | 3.09E−04 | — |
| 8156 | 1566144_at | 3.09E−04 | — |
| 8165 | 1559497_at | 0.0025 | — |
| 8182 | 1570639_at | 5.00E−05 | — |
| 10151 | 1561154_at | 6.25E−04 | — |
| 10151 | 237124_at | 0.003333 | — |
| 8221 | 242995_at | 0.005 | — |
| 8236 | 239088_at | 0.003 | — |
| 8246 | 1562076_at | 3.88E−05 | — |
| 8247 | 1563279_at | 5.00E−04 | — |
| 8247 | 1570483_at | 0.002 | — |
| 8252 | 1565874_at | 0.004 | — |
| 8264 | 230118_at | 4.20E−04 | — |
| 8264 | 1563154_at | 7.80E−04 | — |
| 5618 | 242390_at | 1.00E−05 | — |
| 8270 | 1560868_s_at | 3.00E−06 | — |
| 8270 | 222247_at | 5.00E−04 | — |
| 8303 | 205183_at | 0.001696 | — |
| 8303 | 235399_at | 6.26E−04 | — |
| 8303 | 231937_at | 6.01E−04 | — |
| 8303 | 1565837_at | 4.06E−05 | — |
| 8303 | 1563345_at | 8.88E−04 | — |
| 8303 | 1562811_at | 3.00E−04 | — |
| 8303 | 1561156_at | 2.87E−04 | — |
| 8303 | 1557335_at | 3.69E−04 | — |
| 8303 | 242476_at | 7.00E−05 | — |
| 8303 | 206936_x_at | 1.69E−04 | — |
| 8306 | 243667_at | 0.001051 | — |
| 8311 | 1562905_at | 3.17E−04 | — |
| 8311 | 217653_x_at | 9.02E−05 | — |
| 8311 | 233776_at | 4.99E−04 | — |
| 8318 | 222337_at | 0.00145 | — |
| 8319 | 1561107_at | 0.001 | — |
| 8320 | 207915_at | 3.27E−04 | — |
| 8324 | 242842_at | 5.15E−04 | — |
| 8355 | 243485_at | 5.00E−04 | — |
| 8366 | 222373_at | 1.44E−04 | — |
| 8366 | 1557301_a_at | 1.02E−04 | — |
| 8366 | 1561432_at | 1.00E−05 | — |
| 8366 | 241913_at | 4.00E−05 | — |
| 8366 | 215824_at | 4.80E−04 | — |
| 8366 | 1561591_at | 4.50E−04 | — |
| 8376 | 1569537_at | 3.00E−06 | — |
| 8407 | 241468_at | 3.00E−06 | — |
| 8430 | 232797_at | 0.002 | — |
| 8442 | 236327_at | 0.002 | — |
| 8453 | 233824_at | 6.67E−04 | — |
| 8453 | 1566535_at | 1.00E−06 | — |
| 8453 | 243203_at | 1.00E−06 | — |
| 8453 | 233904_at | 1.00E−05 | — |
| 8462 | 1555392_at | 4.00E−05 | — |
| 8463 | 1569354_at | 5.00E−04 | — |
| 8490 | 237023_at | 3.00E−06 | — |
| 8514 | 233716_at | 4.47E−06 | — |
| 8568 | 242369_x_at | 4.00E−05 | — |
| 8614 | 243577_at | 0.002 | — |
| 8672 | 235872_at | 1.00E−07 | — |
| 8672 | 239995_at | 6.00E−04 | — |
| 8678 | 230461_s_at | 4.00E−10 | — |
| 8699 | 1565722_at | 4.10E−05 | — |
| 8755 | 1566688_at | 0.002 | — |
| 8763 | 237868_x_at | 0.001008 | — |
| 8763 | 1556683_x_at | 3.73E−04 | — |
| 8763 | 217580_x_at | 8.70E−04 | — |
| 8763 | 217579_x_at | 8.70E−04 | — |
| 8763 | 1569181_x_at | 5.00E−05 | — |
| 8763 | 1569180_at | 5.00E−05 | — |
| 8763 | 240205_x_at | 1.00E−04 | — |
| 8763 | 233867_at | 6.50E−05 | — |
| 8763 | 1561149_at | 6.00E−04 | — |
| 8766 | 215956_at | 7.23E−05 | — |
| 8766 | 1561741_at | 1.88E−04 | — |
| 8788 | 233115_at | 0.003 | — |
| 8791 | 217126_at | 7.00E−06 | — |
| 8791 | 1563076_x_at | 7.00E−06 | — |
| 8791 | 1563075_s_at | 7.00E−06 | — |
| 8791 | 1561713_at | 7.00E−06 | — |
| 8792 | 217706_at | 3.62E−04 | — |
| 8806 | 236923_x_at | 0.002 | — |
| 8819 | 1561642_at | 0.001 | — |
| 8819 | 232749_at | 2.95E−04 | — |
| 8823 | 216112_at | 1.00E−05 | — |
| 8829 | 1561417_x_at | 4.00E−06 | — |
| 8829 | 1561415_at | 4.00E−06 | — |
| 8839 | 233248_at | 2.00E−04 | — |
| 8846 | 208061_at | 0.003 | — |
| 8885 | 240978_at | 1.00E−05 | — |
| 8892 | 1562145_at | 6.68E−04 | — |
| 8900 | 238570_at | 0.002 | — |
| 67 | 1560540_x_at | 7.30E−04 | — |
| 67 | 1557712_x_at | 8.26E−04 | — |
| 67 | 1557710_at | 8.26E−04 | — |
| 67 | 242609_x_at | 0.001114 | — |
| 67 | 1566768_at | 5.89E−04 | — |
| 5935 | 1561914_at | 2.30E−04 | — |
| 8994 | 1561562_at | 0.001203 | — |
| 5937 | 243037_at | 7.60E−04 | — |
| 5937 | 234148_at | 5.08E−04 | — |
| 5937 | 1564148_at | 2.46E−04 | — |
| 5937 | 1562771_at | 8.39E−05 | — |
| 5937 | 1560230_at | 5.79E−04 | — |
| 5937 | 215406_at | 2.19E−04 | — |
| 5937 | 234643_x_at | 8.71E−04 | — |
| 5937 | 209446_s_at | 8.29E−04 | — |
| 5937 | 1564789_at | 1.38E−04 | — |
| 5937 | 1563303_at | 2.62E−04 | — |
| 5937 | 1560774_at | 0.001013 | — |
| 5937 | 1555617_x_at | 4.07E−05 | — |
| 5937 | 1555616_at | 4.07E−05 | — |
| 5937 | 215597_x_at | 2.78E−04 | — |
| 5937 | 229255_x_at | 2.20E−04 | — |
| 5937 | 234478_at | 4.79E−04 | — |
| 9005 | 234654_at | 1.00E−11 | — |
| 9010 | 239603_x_at | 1.00E−04 | — |
| 9051 | 1562925_at | 5.05E−04 | — |
| 9051 | 216691_at | 1.70E−04 | — |
| 9051 | 239366_at | 5.00E−04 | — |
| 9051 | 1559377_at | 3.05E−04 | — |
| 9101 | 1562586_at | 1.00E−07 | — |
| 897 | 1560349_at | 3.00E−06 | — |
| 915 | 242643_x_at | 0.001338 | — |
| 932 | 1564568_at | 3.61E−04 | — |
| 932 | 241265_x_at | 8.10E−05 | — |
| 959 | 215872_at | 5.50E−05 | — |
| 959 | 234535_at | 5.50E−05 | — |
| 959 | 1560673_at | 5.50E−05 | — |
| 959 | 232773_at | 2.70E−04 | — |
| 1034 | 207875_at | 0.00125 | — |
| 1040 | 242752_at | 7.00E−06 | — |
| 1043 | 207436_x_at | 1.09E−04 | — |
| 1043 | 1563934_at | 1.09E−04 | — |
| 1043 | 217531_at | 6.43E−04 | — |
| 1043 | 216642_at | 1.93E−04 | — |
| 1043 | 242813_at | 1.41E−04 | — |
| 1043 | 217288_at | 2.41E−04 | — |
| 1043 | 216769_x_at | 1.32E−04 | — |
| 1043 | 233218_at | 1.65E−04 | — |
| 1043 | 1560347_at | 2.66E−04 | — |
| 1043 | 1559210_at | 1.91E−04 | — |
| 1043 | 214989_x_at | 9.53E−04 | — |
| 1043 | 1566703_at | 7.69E−04 | — |
| 1043 | 1560721_at | 8.00E−04 | — |
| 1043 | 1557864_x_at | 2.05E−04 | — |
| 1043 | 1564773_x_at | 4.86E−04 | — |
| 1043 | 1557522_x_at | 6.59E−04 | — |
| 1043 | 1570331_at | 3.39E−05 | — |
| 1047 | 234501_x_at | 2.46E−05 | — |
| 1047 | 233390_at | 1.61E−04 | — |
| 1047 | 1559683_at | 1.87E−04 | — |
| 1047 | 217679_x_at | 6.92E−04 | — |
| 1047 | 1565740_at | 2.12E−04 | — |
| 1047 | 1560678_at | 3.35E−05 | — |
| 1047 | 1557468_at | 4.59E−04 | — |
| 1047 | 241268_x_at | 9.72E−04 | — |
| 1047 | 234156_at | 4.46E−04 | — |
| 1129 | 1569942_at | 6.13E−04 | — |
| 1129 | 239788_at | 4.74E−04 | — |
| 1129 | 1562541_at | 1.48E−04 | — |
| 1129 | 1559753_at | 1.48E−04 | — |
| 1129 | 231317_at | 2.60E−04 | — |
| 1129 | 243660_at | 4.00E−04 | — |
| 1138 | 217606_at | 5.00E−04 | — |
| 1177 | 241718_x_at | 5.10E−04 | — |
| 1201 | 1555373_at | 3.00E−05 | — |
| 1340 | 238743_at | 9.00E−04 | — |
| 1340 | 236628_at | 2.22E−04 | — |
| 1340 | 243442_x_at | 8.34E−04 | — |
| 1340 | 243866_x_at | 9.50E−04 | — |
| 1340 | 239195_at | 0.001325 | — |
| 1407 | 233038_at | 1.94E−04 | — |
| 1407 | 243207_at | 3.24E−04 | — |
| 1407 | 216745_x_at | 7.13E−04 | — |
| 1407 | 233832_at | 0.00202 | — |
| 1407 | 233817_at | 0.001629 | — |
| 1407 | 1563482_at | 0.001185 | — |
| 1407 | 238611_at | 2.34E−04 | — |
| 1407 | 232875_at | 1.61E−04 | — |
| 6009 | 1559523_at | 3.40E−04 | — |
| 6009 | 1559702_at | 0.0025 | — |
| 1428 | 1566518_at | 8.33E−05 | — |
| 1428 | 1561573_at | 2.00E−04 | — |
| 1428 | 1563297_s_at | 6.00E−05 | — |
| 1443 | 1564056_at | 6.00E−05 | — |
| 1444 | 1559452_a_at | 8.80E−04 | — |
| 1458 | 216562_at | 0.003 | — |
| 1471 | 234222_at | 1.44E−06 | — |
| 1515 | 210723_x_at | 1.97E−04 | — |
| 1516 | 1564294_at | 5.89E−04 | — |
| 1562 | 1568869_at | 0.001233 | — |
| 1562 | 221130_s_at | 0.001196 | — |
| 1562 | 217639_at | 0.00118 | — |
| 1562 | 217479_at | 4.94E−04 | — |
| 1562 | 215650_at | 8.03E−04 | — |
| 1562 | 211369_at | 0.001015 | — |
| 1562 | 221184_at | 0.001139 | — |
| 1562 | 215893_x_at | 7.72E−04 | — |
| 1562 | 232867_at | 5.30E−04 | — |
| 1562 | 232743_at | 0.001158 | — |
| 1562 | 1568754_at | 0.0015 | — |
| 1562 | 1565705_x_at | 6.10E−04 | — |
| 1562 | 1561463_at | 0.001002 | — |
| 1562 | 1557849_at | 8.84E−04 | — |
| 1562 | 1556815_at | 9.56E−04 | — |
| 6025 | 244843_x_at | 1.00E−06 | — |
| 6038 | 230642_at | 5.50E−05 | — |
| 9320 | 242936_at | 3.20E−04 | — |
| 9320 | 1565628_at | 0.001505 | — |
| 9330 | 216499_at | 2.01E−04 | — |
| 9338 | 1570205_at | 4.12E−04 | — |
| 9338 | 233721_x_at | 5.22E−05 | — |
| 9338 | 215846_at | 5.53E−05 | — |
| 9338 | 210679_x_at | 1.48E−04 | — |
| 9338 | 215742_at | 2.27E−04 | — |
| 9338 | 1564840_at | 3.95E−04 | — |
| 9338 | 1557644_at | 5.97E−05 | — |
| 9338 | 235123_at | 2.16E−04 | — |
| 9338 | 1570198_x_at | 1.35E−04 | — |
| 9338 | 1564336_at | 1.02E−04 | — |
| 9338 | 221176_x_at | 2.83E−04 | — |
| 9338 | 1562947_x_at | 1.21E−05 | — |
| 9338 | 1562946_at | 1.21E−05 | — |
| 9338 | 215609_at | 5.15E−04 | — |
| 9342 | 242924_at | 1.00E−06 | — |
| 9345 | 1564767_at | 4.31E−06 | — |
| 9345 | 1562036_at | 2.58E−04 | — |
| 9345 | 232995_at | 0.001864 | — |
| 9345 | 222306_at | 1.81E−04 | — |
| 9345 | 234046_at | 9.03E−05 | — |
| 9345 | 233677_at | 2.19E−05 | — |
| 9345 | 1561600_at | 2.48E−05 | — |
| 9345 | 1561181_at | 2.23E−05 | — |
| 9345 | 1557631_at | 1.28E−04 | — |
| 9345 | 242501_at | 4.12E−04 | — |
| 9345 | 216051_x_at | 2.71E−04 | — |
| 9345 | 244145_at | 1.08E−04 | — |
| 9352 | 239900_x_at | 2.29E−04 | — |
| 9352 | 235028_at | 1.38E−04 | — |
| 9352 | 232919_at | 9.26E−04 | — |
| 9352 | 233994_at | 2.04E−04 | — |
| 9352 | 242815_x_at | 1.01E−05 | — |
| 9352 | 234047_at | 3.65E−05 | — |
| 9352 | 1564753_at | 2.38E−04 | — |
| 9352 | 240529_at | 1.66E−04 | — |
| 9352 | 1566582_x_at | 0.00101 | — |
| 9354 | 215372_x_at | 5.50E−05 | — |
| 9358 | 231888_at | 4.00E−08 | — |
| 9365 | 216789_at | 3.63E−04 | — |
| 9365 | 233931_at | 3.81E−06 | — |
| 9365 | 239409_at | 4.50E−05 | — |
| 9365 | 234423_x_at | 0.001618 | — |
| 9365 | 1561555_at | 8.70E−04 | — |
| 9365 | 1563033_x_at | 0.00125 | — |
| 9365 | 1563032_at | 0.00125 | — |
| 9396 | 1560443_at | 6.00E−04 | — |
| 9397 | 237488_at | 3.16E−05 | — |
| 5636 | 1569779_at | 3.09E−05 | — |
| 1582 | 1569539_at | 9.00E−04 | — |
| 1599 | 240541_at | 2.70E−04 | — |
| 1604 | 242025_at | 0.00201 | — |
| 1604 | 1566106_at | 0.001595 | — |
| 6061 | 239497_at | 9.00E−04 | — |
| 1665 | 242564_at | 0.003 | — |
| 1717 | 236801_at | 2.50E−04 | — |
| 1732 | 241848_x_at | 2.47E−04 | — |
| 1732 | 216811_at | 9.40E−05 | — |
| 1732 | 233041_x_at | 1.87E−04 | — |
| 1732 | 1569341_at | 2.60E−04 | — |
| 1732 | 232347_x_at | 4.39E−04 | — |
| 1732 | 1556595_at | 3.50E−04 | — |
| 1732 | 232622_at | 4.13E−04 | — |
| 1732 | 1557897_at | 2.13E−04 | — |
| 1750 | 210717_at | 0.002 | — |
| 1752 | 1570065_at | 0.002023 | — |
| 1784 | 1568867_x_at | 0.001107 | — |
| 1784 | 1568866_at | 0.001107 | — |
| 1784 | 232496_at | 4.91E−04 | — |
| 1885 | 232273_at | 0.001072 | — |
| 1904 | 243561_at | 0.003 | — |
| 1920 | 230350_at | 6.00E−04 | — |
| 1921 | 242612_at | 1.50E−04 | — |
| 1921 | 220913_at | 0.005 | — |
| 1921 | 243078_at | 0.005 | — |
| 1921 | 236235_at | 0.005 | — |
| 1943 | 239752_at | 2.50E−05 | — |
| 1964 | 239418_x_at | 1.00E−06 | — |
| 1964 | 1556345_s_at | 1.00E−06 | — |
| 1964 | 234439_at | 3.13E−04 | — |
| 1964 | 237398_at | 7.00E−04 | — |
| 98 | 235681_at | 0.003 | — |
| 2045 | 217443_at | 1.19E−04 | — |
| 2045 | 1558742_at | 5.20E−06 | — |
| 2045 | 234245_at | 0.00102 | — |
| 2045 | 1561829_at | 2.36E−04 | — |
| 2045 | 1557996_at | 6.18E−06 | — |
| 2045 | 240535_at | 3.40E−05 | — |
| 2045 | 239969_at | 1.50E−04 | — |
| 2045 | 231489_x_at | 9.51E−04 | — |
| 2045 | 239649_at | 5.00E−04 | — |
| 2045 | 1566232_at | 4.10E−04 | — |
| 2045 | 1566209_at | 0.001115 | — |
| 2089 | 217616_at | 9.58E−05 | — |
| 2089 | 217423_at | 9.17E−06 | — |
| 2089 | 241615_x_at | 1.38E−04 | — |
| 2108 | 233425_at | 1.00E−05 | — |
| 2108 | 242724_x_at | 5.50E−05 | — |
| 2110 | 244047_at | 0.001858 | — |
| 2110 | 208144_s_at | 1.64E−04 | — |
| 115 | 1561036_at | 2.30E−05 | — |
| 115 | 1560332_at | 1.19E−04 | — |
| 115 | 244588_at | 3.41E−04 | — |
| 115 | 1561346_at | 2.44E−04 | — |
| 115 | 1555303_at | 1.26E−05 | — |
| 115 | 222961_at | 3.16E−05 | — |
| 115 | 1569912_at | 5.38E−04 | — |
| 115 | 1563472_at | 3.17E−04 | — |
| 2136 | 1569767_at | 0.00125 | — |
| 2136 | 242658_at | 5.38E−04 | — |
| 117 | 1566716_at | 5.05E−04 | — |
| 2168 | 1566580_at | 5.00E−05 | — |
| 2173 | 1566527_at | 4.50E−06 | — |
| 123 | 243568_at | 6.57E−04 | — |
| 123 | 1562454_at | 0.001118 | — |
| 123 | 241303_x_at | 7.85E−04 | — |
| 123 | 1553462_at | 3.47E−05 | — |
| 123 | 240839_at | 4.63E−05 | — |
| 123 | 215607_x_at | 0.001023 | — |
| 2219 | 1557375_at | 2.00E−04 | — |
| 125 | 232962_x_at | 9.86E−05 | — |
| 130 | 1559821_at | 1.00E−05 | — |
| 2270 | 1557099_at | 2.20E−04 | — |
| 2274 | 237549_at | 0.001005 | — |
| 133 | 1566540_at | 1.00E−05 | — |
| 2300 | 1569673_at | 5.00E−04 | — |
| 2300 | 231231_at | 0.002 | — |
| 2315 | 242978_x_at | 7.58E−05 | — |
| 2322 | 237650_at | 0.002 | — |
| 2339 | 241865_at | 9.00E−05 | — |
| 2339 | 217293_at | 0.004 | — |
| 2341 | 1562168_at | 8.00E−04 | — |
| 2497 | 1563030_at | 4.00E−06 | — |
| 2582 | 1563611_at | 7.00E−05 | — |
| 2584 | 233181_at | 1.73E−04 | — |
| 2584 | 235800_at | 0.002 | — |
| 174 | 237539_at | 2.70E−05 | — |
| 174 | 243642_x_at | 3.20E−04 | — |
| 174 | 1563036_at | 3.01E−04 | — |
| 2700 | 1556521_a_at | 1.00E−13 | — |
| 2768 | 233912_x_at | 3.00E−06 | — |
| 2768 | 221179_at | 3.00E−06 | — |
| 2768 | 239868_at | 0.002 | — |
| 2774 | 1560264_at | 7.33E−06 | — |
| 183 | 242646_at | 5.05E−07 | — |
| 2790 | 1561595_x_at | 0.001767 | — |
| 2812 | 243984_at | 6.00E−05 | — |
| 2814 | 242117_at | 0.003 | — |
| 2814 | 221120_at | 0.003 | — |
| 2821 | 1568887_at | 0.004 | — |
| 2824 | 210920_x_at | 1.51E−04 | — |
| 2824 | 243931_at | 8.68E−06 | — |
| 2824 | 220700_at | 1.45E−04 | — |
| 2824 | 217643_x_at | 1.68E−04 | — |
| 2824 | 234814_at | 1.58E−04 | — |
| 2824 | 232714_at | 7.31E−05 | — |
| 2824 | 242740_at | 1.29E−04 | — |
| 2824 | 242413_at | 1.25E−04 | — |
| 2824 | 239333_x_at | 1.42E−04 | — |
| 2824 | 217570_x_at | 7.66E−06 | — |
| 2824 | 238829_at | 1.02E−04 | — |
| 2824 | 238672_at | 1.93E−04 | — |
| 2824 | 215204_at | 4.91E−05 | — |
| 2824 | 236060_at | 4.36E−05 | — |
| 2824 | 234214_at | 2.58E−04 | — |
| 2824 | 234193_at | 2.96E−04 | — |
| 2824 | 233358_at | 2.68E−04 | — |
| 2824 | 233289_at | 1.34E−04 | — |
| 2824 | 233154_at | 1.10E−04 | — |
| 2824 | 233037_at | 9.90E−06 | — |
| 2824 | 232723_at | 9.42E−05 | — |
| 2824 | 232626_at | 6.07E−04 | — |
| 2824 | 208238_x_at | 6.58E−04 | — |
| 2824 | 207756_at | 9.32E−05 | — |
| 2824 | 207730_x_at | 2.28E−04 | — |
| 2824 | 207481_at | 6.18E−05 | — |
| 2824 | 1570361_a_at | 7.15E−05 | — |
| 2824 | 1570100_at | 1.15E−04 | — |
| 2824 | 1569952_x_at | 1.60E−04 | — |
| 2824 | 1569772_x_at | 1.91E−04 | — |
| 2824 | 1569712_at | 3.89E−06 | — |
| 2824 | 1569577_x_at | 1.91E−04 | — |
| 2824 | 1566243_at | 1.01E−04 | — |
| 2824 | 1564937_at | 5.17E−04 | — |
| 2824 | 1563461_at | 3.98E−05 | — |
| 2824 | 1562890_at | 1.64E−05 | — |
| 2824 | 1562265_at | 5.68E−06 | — |
| 2824 | 1560792_at | 7.17E−05 | — |
| 2824 | 1559795_at | 2.07E−04 | — |
| 2824 | 1559652_at | 1.22E−04 | — |
| 2824 | 1557486_at | 3.55E−04 | — |
| 2824 | 1552975_x_at | 3.93E−05 | — |
| 2824 | 1552974_at | 3.88E−05 | — |
| 2824 | 240706_at | 6.70E−05 | — |
| 2824 | 210598_at | 1.89E−04 | — |
| 2824 | 243391_x_at | 3.66E−05 | — |
| 2824 | 216123_x_at | 2.75E−04 | — |
| 2824 | 214902_x_at | 2.18E−04 | — |
| 2824 | 236153_at | 2.18E−04 | — |
| 2824 | 234656_x_at | 2.73E−04 | — |
| 2824 | 234060_at | 2.06E−05 | — |
| 2824 | 1570496_at | 0.001087 | — |
| 2824 | 1565809_x_at | 4.64E−04 | — |
| 2824 | 233004_x_at | 1.02E−04 | — |
| 2824 | 216189_at | 5.87E−05 | — |
| 2824 | 234494_x_at | 9.65E−04 | — |
| 2824 | 216771_at | 4.53E−04 | — |
| 2824 | 215494_at | 7.60E−04 | — |
| 2824 | 235105_at | 7.08E−04 | — |
| 2824 | 1562823_at | 1.65E−04 | — |
| 2824 | 1559663_at | 2.37E−04 | — |
| 2824 | 241159_x_at | 0.001643 | — |
| 2824 | 215587_x_at | 4.58E−04 | — |
| 2824 | 234788_x_at | 8.93E−04 | — |
| 2824 | 1566953_x_at | 1.43E−04 | — |
| 2824 | 1566952_at | 1.43E−04 | — |
| 2824 | 215831_at | 1.08E−04 | — |
| 2824 | 215439_x_at | 1.60E−04 | — |
| 2824 | 214808_at | 3.12E−04 | — |
| 2824 | 234517_at | 8.58E−05 | — |
| 2824 | 234346_x_at | 4.24E−04 | — |
| 2824 | 1570295_at | 1.70E−04 | — |
| 2824 | 222170_at | 3.95E−04 | — |
| 2824 | 1561604_at | 1.87E−04 | — |
| 187 | 232894_at | 4.00E−05 | — |
| 187 | 229932_at | 4.00E−05 | — |
| 2836 | 1562642_at | 0.001 | — |
| 194 | 233014_at | 1.00E−04 | — |
| 2936 | 235575_at | 1.00E−08 | — |
| 2955 | 232803_at | 0.002 | — |
| 3000 | 231055_at | 2.00E−05 | — |
| 3002 | 1561732_at | 3.60E−04 | — |
| 211 | 1566809_a_at | 3.50E−04 | — |
| 3087 | 1563597_at | 0.003 | — |
| 10183 | 240000_at | 0.00145 | — |
| 3146 | 240485_at | 0.004 | — |
| 3167 | 236975_at | 2.00E−04 | — |
| 5652 | 1556486_at | 4.00E−05 | — |
| 5652 | 233768_at | 1.30E−04 | — |
| 5652 | 242024_at | 2.00E−04 | — |
| 5652 | 216625_at | 7.00E−04 | — |
| 5652 | 1570138_at | 0.001061 | — |
| 5652 | 1564820_at | 0.001567 | — |
| 3197 | 234527_at | 1.27E−08 | — |
| 3204 | 1562755_at | 1.00E−04 | — |
| 3215 | 232344_at | 6.50E−06 | — |
| 3277 | 1557232_at | 4.85E−04 | — |
| 3285 | 1559467_at | 1.00E−04 | — |
| 3287 | 229011_at | 7.75E−06 | — |
| 3322 | 216414_at | 4.00E−06 | — |
| 3348 | 217577_at | 5.00E−04 | — |
| 3381 | 232402_at | 0.003 | — |
| 3395 | 242174_at | 0.001315 | — |
| 3395 | 236571_at | 0.001508 | — |
| 3402 | 216425_at | 0.0012 | — |
| 3402 | 234492_at | 4.85E−04 | — |
| 250 | 1569603_at | 4.00E−07 | — |
| 3465 | 243876_at | 2.82E−05 | — |
| 3465 | 242223_at | 1.09E−04 | — |
| 3465 | 235716_at | 7.78E−05 | — |
| 3465 | 1565877_at | 3.75E−05 | — |
| 3465 | 1565876_x_at | 3.75E−05 | — |
| 3465 | 1563519_at | 2.33E−05 | — |
| 3465 | 1560971_a_at | 2.18E−05 | — |
| 3465 | 1560798_at | 7.95E−05 | — |
| 3465 | 233315_at | 3.87E−04 | — |
| 3465 | 234283_at | 5.38E−05 | — |
| 3465 | 233128_at | 1.48E−04 | — |
| 3465 | 216110_x_at | 7.77E−04 | — |
| 3465 | 234574_at | 1.88E−04 | — |
| 3465 | 216729_at | 2.99E−04 | — |
| 3465 | 1557630_s_at | 5.00E−04 | — |
| 3465 | 230663_at | 0.001507 | — |
| 3465 | 220696_at | 8.40E−04 | — |
| 3465 | 234020_x_at | 1.06E−04 | — |
| 3465 | 1557555_at | 1.07E−04 | — |
| 3465 | 1562863_at | 2.78E−04 | — |
| 3465 | 234059_at | 6.83E−05 | — |
| 3509 | 232335_at | 4.00E−08 | — |
| 3509 | 216669_at | 2.31E−04 | — |
| 3572 | 244274_at | 0.003 | — |
| 3577 | 238495_at | 0.004 | — |
| 3588 | 234182_at | 2.88E−04 | — |
| 3588 | 1563704_at | 2.43E−05 | — |
| 3588 | 1569703_a_at | 1.53E−05 | — |
| 3588 | 215763_at | 3.16E−04 | — |
| 3588 | 1561612_at | 5.17E−04 | — |
| 3588 | 238248_at | 0.00102 | — |
| 264 | 1565856_at | 8.00E−05 | — |
| 264 | 233515_at | 2.00E−05 | — |
| 264 | 1569208_a_at | 2.00E−05 | — |
| 264 | 1570244_at | 4.26E−04 | — |
| 264 | 1562035_at | 3.00E−04 | — |
| 3592 | 242495_at | 1.04E−04 | — |
| 3592 | 243640_x_at | 1.12E−04 | — |
| 3592 | 243147_x_at | 7.11E−05 | — |
| 3592 | 242448_at | 7.33E−04 | — |
| 3592 | 1563114_at | 7.33E−04 | — |
| 3592 | 216101_at | 8.32E−04 | — |
| 3609 | 239735_at | 2.08E−04 | — |
| 3620 | 1563329_s_at | 2.45E−06 | — |
| 3620 | 1559372_at | 4.32E−04 | — |
| 3620 | 235407_at | 1.28E−04 | — |
| 3624 | 237410_x_at | 0.00125 | — |
| 3628 | 239408_at | 2.00E−05 | — |
| 3628 | 242588_at | 3.00E−04 | — |
| 3628 | 240271_at | 3.00E−04 | — |
| 3646 | 1559259_at | 2.78E−04 | — |
| 3660 | 1566880_at | 5.00E−04 | — |
| 3660 | 233094_at | 5.00E−04 | — |
| 3676 | 222356_at | 6.57E−05 | — |
| 3676 | 1559709_at | 3.66E−04 | — |
| 3697 | 237561_x_at | 0.001022 | — |
| 3842 | 242695_at | 0.002 | — |
| 3857 | 232997_at | 4.20E−04 | — |
| 293 | 237245_at | 6.16E−04 | — |
| 3906 | 1557409_at | 0.001694 | — |
| 3913 | 235594_at | 1.00E−06 | — |
| 3935 | 229206_at | 3.03E−04 | — |
| 3964 | 241135_at | 7.00E−05 | — |
| 147 | 237580_at | 2.90E−05 | — |
| 3991 | 1563750_at | 0.00125 | — |
| 4012 | 233420_at | 1.10E−05 | — |
| 4033 | 1561654_at | 4.00E−05 | — |
| 4064 | 240630_at | 0.002 | — |
| 4161 | 234087_at | 4.00E−04 | — |
| 4161 | 233373_at | 0.004 | — |
| 324 | 241835_at | 1.00E−04 | — |
| 4220 | 234590_x_at | 1.27E−04 | — |
| 4220 | 1566848_x_at | 6.92E−04 | — |
| 4247 | 241388_at | 0.002 | — |
| 4286 | 217533_x_at | 4.00E−08 | — |
| 4286 | 233505_at | 0.001 | — |
| 4292 | 238738_at | 3.38E−04 | — |
| 5663 | 215577_at | 2.00E−04 | — |
| 4255 | 1559449_a_at | 7.00E−05 | — |
| 4255 | 1556685_at | 0.002 | — |
| 4267 | 216067_at | 3.00E−06 | — |
| 4267 | 224056_at | 2.89E−04 | — |
| 4268 | 241207_at | 6.50E−06 | — |
| 4268 | 208185_x_at | 2.13E−06 | — |
| 4268 | 1569167_at | 1.43E−04 | — |
| 4268 | 1569916_at | 6.50E−06 | — |
| 4268 | 232906_at | 3.80E−04 | — |
| 4268 | 236215_at | 2.15E−05 | — |
| 4317 | 242878_at | 1.87E−04 | — |
| 4331 | 238913_at | 1.70E−05 | — |
| 4331 | 1569275_at | 6.29E−04 | — |
| 4331 | 233142_at | 6.75E−05 | — |
| 4331 | 214388_at | 3.67E−04 | — |
| 4331 | 233407_at | 1.07E−04 | — |
| 4331 | 1558474_at | 0.001077 | — |
| 4331 | 239311_at | 4.63E−04 | — |
| 4331 | 1560405_at | 9.50E−04 | — |
| 4331 | 232889_at | 0.001033 | — |
| 4331 | 228623_at | 0.001033 | — |
| 345 | 220719_at | 3.72E−04 | — |
| 345 | 234153_at | 2.01E−04 | — |
| 345 | 233779_x_at | 0.002833 | — |
| 345 | 242535_at | 1.05E−04 | — |
| 345 | 1565802_at | 3.91E−04 | — |
| 345 | 232742_at | 7.23E−04 | — |
| 345 | 236549_x_at | 0.002 | — |
| 4392 | 234572_at | 2.36E−04 | — |
| 4415 | 1559810_at | 3.00E−06 | — |
| 4482 | 233922_at | 0.00124 | — |
| 4579 | 224105_x_at | 2.70E−04 | — |
| 4579 | 233739_at | 3.17E−04 | — |
| 4579 | 234565_x_at | 1.23E−04 | — |
| 4579 | 1563241_at | 4.35E−04 | — |
| 4579 | 1558078_at | 1.58E−04 | — |
| 4579 | 234382_x_at | 5.35E−04 | — |
| 4579 | 232363_at | 3.41E−04 | — |
| 4579 | 1562661_at | 2.53E−04 | — |
| 4579 | 242859_at | 2.24E−04 | — |
| 4579 | 241867_at | 7.35E−05 | — |
| 4579 | 210230_at | 0.00176 | — |
| 4579 | 214807_at | 1.53E−04 | — |
| 4579 | 1569491_at | 2.11E−04 | — |
| 4579 | 231212_x_at | 3.78E−04 | — |
| 4583 | 208301_at | 3.16E−04 | — |
| 4599 | 238016_s_at | 3.00E−06 | — |
| 4621 | 216630_at | 9.78E−05 | — |
| 4677 | 234122_at | 5.00E−07 | — |
| 378 | 234224_at | 1.78E−04 | — |
| 378 | 1564905_at | 1.45E−04 | — |
| 378 | 217713_x_at | 3.16E−04 | — |
| 378 | 215083_at | 7.84E−04 | — |
| 378 | 229949_at | 6.00E−04 | — |
| 378 | 1566763_at | 6.00E−04 | — |
| 4737 | 1557584_at | 0.001525 | — |
| 4793 | 242886_at | 1.85E−05 | — |
| 4793 | 242256_x_at | 6.22E−05 | — |
| 4793 | 234789_at | 1.66E−04 | — |
| 4793 | 1569540_at | 1.89E−04 | — |
| 4793 | 222320_at | 1.42E−04 | — |
| 4793 | 1570409_x_at | 6.23E−04 | — |
| 4793 | 1570408_at | 2.83E−05 | — |
| 4793 | 1558385_at | 4.05E−05 | — |
| 4793 | 1554972_at | 1.40E−05 | — |
| 4793 | 232665_x_at | 1.02E−04 | — |
| 4793 | 1570196_at | 1.37E−05 | — |
| 4793 | 215373_x_at | 9.94E−05 | — |
| 4793 | 222207_x_at | 2.17E−04 | — |
| 4808 | 215837_x_at | 2.30E−04 | — |
| 4808 | 215197_at | 6.58E−05 | — |
| 4808 | 234578_at | 1.35E−04 | — |
| 4808 | 233900_at | 1.92E−04 | — |
| 4808 | 1562063_x_at | 2.07E−04 | — |
| 4808 | 1562062_at | 9.92E−05 | — |
| 4808 | 1558672_at | 1.58E−04 | — |
| 4808 | 1555718_x_at | 7.98E−05 | — |
| 4808 | 1555717_at | 7.98E−05 | — |
| 4808 | 217524_x_at | 1.84E−04 | — |
| 4808 | 232495_x_at | 2.26E−04 | — |
| 4814 | 207487_at | 8.40E−04 | — |
| 4859 | 230757_at | 7.00E−07 | — |
| 4906 | 216675_at | 4.00E−04 | — |
| 4906 | 244637_at | 2.70E−04 | — |
| 4906 | 235662_at | 0.002 | — |
| 4917 | 224546_at | 9.00E−04 | — |
| 4950 | 233765_at | 7.00E−18 | — |
| 4964 | 1560258_a_at | 0.002 | — |
| 4973 | 233272_at | 5.00E−04 | — |
| 4995 | 1555374_at | 0.002 | — |
| 5016 | 232544_at | 0.001685 | — |
| 5016 | 241097_at | 6.70E−04 | — |
| 5016 | 244482_at | 0.001 | — |
| 5016 | 217164_at | 0.001492 | — |
| 5016 | 1557151_at | 0.002015 | — |
| 5016 | 244869_at | 0.00121 | — |
| 5043 | 216496_s_at | 2.16E−04 | — |
| 5043 | 1561924_at | 4.60E−04 | — |
| 5043 | 1562793_at | 4.75E−04 | — |
| 5043 | 241094_at | 2.72E−04 | — |
| 5043 | 216144_at | 3.51E−04 | — |
| 5043 | 233448_s_at | 1.85E−04 | — |
| 5043 | 232778_at | 1.63E−04 | — |
| 5043 | 231992_x_at | 2.36E−04 | — |
| 5043 | 208162_s_at | 5.22E−04 | — |
| 5043 | 1570013_at | 3.68E−04 | — |
| 5043 | 1566725_at | 2.39E−04 | — |
| 5043 | 1566459_at | 2.89E−04 | — |
| 5043 | 1563561_at | 7.21E−04 | — |
| 5043 | 1557538_at | 1.96E−04 | — |
| 5053 | 1570177_at | 4.00E−10 | — |
| 5069 | 1561581_at | 7.00E−07 | — |
| 416 | 1557224_at | 1.34E−04 | — |
| 416 | 242645_at | 4.25E−04 | — |
| 416 | 1555664_at | 4.46E−04 | — |
| 416 | 242950_x_at | 3.77E−04 | — |
| 416 | 216645_at | 2.49E−04 | — |
| 416 | 234170_at | 1.77E−04 | — |
| 416 | 233081_at | 1.59E−04 | — |
| 416 | 1566887_x_at | 2.46E−04 | — |
| 416 | 1559509_at | 6.01E−05 | — |
| 416 | 1557135_at | 2.70E−04 | — |
| 5127 | 1566279_at | 2.00E−05 | — |
| 5127 | 1566278_at | 2.00E−05 | — |
| 5127 | 222358_x_at | 8.00E−04 | — |
| 5170 | 240971_x_at | 7.20E−04 | — |
| 5170 | 237451_x_at | 7.94E−04 | — |
| 5170 | 233616_at | 7.96E−04 | — |
| 5170 | 232511_at | 2.73E−04 | — |
| 5170 | AFFX- | 7.67E−05 | — |
| | hum_alu_at | | |
| 5170 | 1569770_x_at | 1.09E−04 | — |
| 5170 | 1569761_x_at | 1.60E−04 | — |
| 5170 | 1569760_at | 1.60E−04 | — |
| 5170 | 1569409_x_at | 5.52E−04 | — |
| 5170 | 1562358_at | 2.14E−04 | — |
| 5170 | 215604_x_at | 2.89E−04 | — |
| 5170 | 215137_at | 1.68E−04 | — |
| 5170 | 233478_at | 4.25E−04 | — |
| 5170 | 232840_at | 6.11E−05 | — |
| 5170 | 1557758_at | 5.87E−04 | — |
| 5170 | 215182_x_at | 2.97E−04 | — |
| 5170 | 241680_at | 6.47E−04 | — |
| 5170 | 1562579_at | 4.21E−04 | — |
| 5170 | 1569929_at | 0.001012 | — |
| 5170 | 215200_x_at | 3.75E−04 | — |
| 5170 | 234113_at | 4.46E−04 | — |
| 5170 | 1566870_at | 3.57E−04 | — |
| 5170 | 1557325_at | 3.74E−04 | — |
| 5170 | 1556931_at | 3.18E−04 | — |
| 5170 | 1555117_at | 4.99E−04 | — |
| 5170 | 220856_x_at | 2.61E−04 | — |
| 5170 | 217481_x_at | 4.75E−04 | — |
| 5170 | 217052_x_at | 3.31E−04 | — |
| 5170 | 234833_at | 5.55E−04 | — |
| 5170 | 234084_x_at | 3.04E−04 | — |
| 5170 | 233427_x_at | 2.84E−04 | — |
| 5170 | 233027_at | 4.31E−04 | — |
| 5170 | 1563052_at | 3.25E−04 | — |
| 5170 | 1560638_a_at | 5.46E−04 | — |
| 5170 | 1560026_at | 4.42E−04 | — |
| 5170 | 210698_at | 4.31E−04 | — |
| 5170 | 1558449_at | 3.02E−04 | — |
| 5170 | 1554723_x_at | 8.60E−05 | — |
| 5170 | 234765_at | 5.91E−04 | — |
| 5170 | 1557908_at | 8.45E−04 | — |
| 5170 | 216858_x_at | 5.08E−04 | — |
| 5170 | 1570645_at | 4.08E−04 | — |
| 5170 | 1564794_at | 3.68E−04 | — |
| 5170 | 1562553_at | 0.002375 | — |
| 5216 | 1565576_at | 6.62E−04 | — |
| 5216 | 1557842_at | 4.35E−04 | — |
| 5328 | 238301_at | 4.17E−05 | — |
| 5328 | 239410_at | 3.73E−04 | — |
| 5328 | 216463_at | 2.11E−05 | — |
| 5328 | 234805_at | 1.44E−04 | — |
| 5328 | 224086_at | 6.20E−05 | — |
| 5328 | 222370_x_at | 9.19E−05 | — |
| 5328 | 222319_at | 2.67E−04 | — |
| 5328 | 220814_at | 1.42E−04 | — |
| 5328 | 242113_at | 7.25E−05 | — |
| 5328 | 216692_at | 2.00E−05 | — |
| 5328 | 216621_at | 5.46E−05 | — |
| 5328 | 216612_x_at | 1.64E−04 | — |
| 5328 | 215958_at | 5.29E−05 | — |
| 5328 | 215928_at | 4.00E−05 | — |
| 5328 | 215370_at | 1.84E−04 | — |
| 5328 | 215314_at | 2.30E−05 | — |
| 5328 | 215163_at | 7.09E−05 | — |
| 5328 | 215128_at | 1.61E−04 | — |
| 5328 | 234247_at | 6.65E−05 | — |
| 5328 | 233702_x_at | 1.41E−04 | — |
| 5328 | 233258_at | 5.43E−05 | — |
| 5328 | 233235_x_at | 5.81E−05 | — |
| 5328 | 233017_x_at | 3.04E−04 | — |
| 5328 | 230580_at | 1.48E−04 | — |
| 5328 | 1570491_at | 3.25E−04 | — |
| 5328 | 1570249_x_at | 2.45E−04 | — |
| 5328 | 1569551_at | 1.68E−05 | — |
| 5328 | 1569416_at | 6.00E−05 | — |
| 5328 | 1566098_at | 3.28E−04 | — |
| 5328 | 1565889_at | 2.57E−05 | — |
| 5328 | 1565888_at | 2.57E−05 | — |
| 5328 | 1564130_x_at | 3.00E−05 | — |
| 5328 | 1563012_x_at | 5.69E−05 | — |
| 5328 | 1562416_at | 2.84E−04 | — |
| 5328 | 1561879_at | 1.01E−04 | — |
| 5328 | 1561737_at | 9.22E−05 | — |
| 5328 | 1560560_at | 2.93E−04 | — |
| 5328 | 1560451_at | 1.65E−04 | — |
| 5328 | 1559037_a_at | 5.55E−05 | — |
| 5328 | 1558889_at | 5.15E−05 | — |
| 5328 | 243103_at | 4.54E−04 | — |
| 5328 | 239251_at | 4.10E−05 | — |
| 5328 | 240813_at | 1.26E−04 | — |
| 5328 | 238382_x_at | 5.28E−05 | — |
| 5328 | 236438_at | 2.08E−05 | — |
| 5328 | 232957_x_at | 1.68E−04 | — |
| 5328 | 232775_at | 3.29E−04 | — |
| 5328 | 216668_at | 3.97E−05 | — |
| 5328 | 207953_at | 1.28E−04 | — |
| 5328 | 222299_x_at | 5.28E−05 | — |
| 5328 | 216524_x_at | 1.40E−04 | — |
| 5328 | 216043_x_at | 1.15E−04 | — |
| 5328 | 216628_at | 2.23E−05 | — |
| 5328 | 244677_at | 4.28E−05 | — |
| 5328 | 244172_at | 6.73E−04 | — |
| 5328 | 222295_x_at | 1.40E−04 | — |
| 5328 | 217490_at | 6.38E−05 | — |
| 5328 | 215615_x_at | 2.29E−05 | — |
| 5328 | 215507_x_at | 7.58E−05 | — |
| 5328 | 215385_at | 5.96E−05 | — |
| 5328 | 233757_x_at | 3.10E−04 | — |
| 5328 | 233608_at | 7.64E−05 | — |
| 5328 | 233296_x_at | 1.45E−05 | — |
| 5328 | 233055_at | 4.49E−05 | — |
| 5328 | 208082_x_at | 1.23E−04 | — |
| 5328 | 244891_x_at | 4.24E−05 | — |
| 5328 | 244258_at | 3.38E−05 | — |
| 5328 | 222328_x_at | 5.08E−05 | — |
| 5328 | 222213_x_at | 1.48E−04 | — |
| 5328 | 242182_x_at | 2.65E−05 | — |
| 5328 | 242101_at | 3.95E−05 | — |
| 5328 | 241816_at | 2.79E−05 | — |
| 5328 | 241722_x_at | 1.58E−05 | — |
| 5328 | 240892_at | 5.07E−05 | — |
| 5328 | 239780_at | 5.26E−05 | — |
| 5328 | 217549_at | 3.31E−05 | — |
| 5328 | 216792_at | 5.55E−05 | — |
| 5328 | 1563080_at | 1.28E−04 | — |
| 5328 | 1560917_at | 3.38E−05 | — |
| 5328 | 221155_x_at | 6.31E−04 | — |
| 5328 | 215553_x_at | 1.80E−04 | — |
| 5328 | 211444_at | 2.23E−04 | — |
| 5328 | 208014_x_at | 4.06E−04 | — |
| 5328 | 1569597_at | 9.43E−05 | — |
| 5328 | 1566777_at | 8.66E−05 | — |
| 5328 | 1562071_at | 4.19E−05 | — |
| 5328 | 233120_at | 6.19E−05 | — |
| 5328 | 243658_at | 1.37E−04 | — |
| 5328 | 215595_x_at | 4.85E−04 | — |
| 5328 | 216472_at | 2.66E−05 | — |
| 5328 | 234773_x_at | 3.02E−04 | — |
| 5407 | 1564665_at | 6.00E−07 | — |
| 5409 | 241806_at | 1.57E−04 | — |
| 5416 | 214912_at | 2.40E−04 | — |
| 5461 | 217682_at | 1.00E−04 | — |
| 5496 | 234223_at | 0.002333 | — |
| 5496 | 1558237_x_at | 0.00228 | — |
| 5519 | 242630_at | 0.002 | — |
| 5522 | 244197_x_at | 1.67E−05 | — |
| 5526 | 242797_x_at | 0.002 | — |
| 5526 | 238967_at | 0.002 | — |
| 5526 | 1561896_at | 6.77E−04 | — |
| 468 | 240791_at | 0.001625 | — |
| 9451 | 233805_at | 9.16E−04 | — |
| 9462 | 1564338_at | 4.00E−06 | — |
| 9475 | 1570093_at | 4.06E−04 | — |
| 9475 | 241443_at | 6.25E−04 | — |
| 9475 | 216132_at | 0.001006 | — |
| 9475 | 243768_at | 6.73E−04 | — |
| 9477 | 220296_at | 9.16E−04 | — |
| 9508 | 217290_at | 0.003 | — |
| 9573 | 217695_x_at | 2.61E−04 | — |
| 9573 | 233553_at | 1.30E−04 | — |
| 9573 | 1569527_at | 2.66E−04 | — |
| 9573 | 1566266_at | 1.26E−04 | — |
| 9573 | 1566265_at | 1.26E−04 | — |
| 9573 | 220809_at | 1.19E−04 | — |
| 9573 | 217586_x_at | 4.94E−04 | — |
| 483 | 1561733_at | 3.25E−05 | — |
| 483 | 216613_at | 4.77E−05 | — |
| 483 | 239857_at | 1.22E−04 | — |
| 483 | 234786_at | 2.03E−04 | — |
| 483 | 240988_x_at | 3.81E−04 | — |
| 483 | 242266_x_at | 5.43E−04 | — |
| 483 | 1561918_at | 2.89E−04 | — |
| 483 | 1557478_at | 7.25E−06 | — |
| 483 | 1568755_a_at | 3.13E−05 | — |
| 483 | 1564472_at | 1.47E−04 | — |
| 9610 | 1561529_at | 1.00E−06 | — |
| 10123 | 234571_at | 3.00E−06 | — |
| 9620 | 243895_x_at | 8.67E−04 | — |
| 9628 | 236765_at | 3.36E−04 | — |
| 9628 | 233790_at | 3.89E−04 | — |
| 9628 | 233376_at | 7.04E−05 | — |
| 9628 | 1569478_s_at | 7.65E−05 | — |
| 9628 | 215196_at | 4.52E−05 | — |
| 9628 | 233627_at | 7.52E−04 | — |
| 9628 | 1554964_x_at | 4.34E−05 | — |
| 9628 | 1554963_at | 4.34E−05 | — |
| 9628 | 1570127_at | 2.19E−04 | — |
| 489 | 1564424_at | 3.20E−04 | — |
| 492 | 216166_at | 4.83E−04 | — |
| 492 | 1562898_at | 2.94E−04 | — |
| 492 | 233526_at | 4.85E−04 | — |
| 492 | 1561966_at | 1.01E−04 | — |
| 492 | 1561663_at | 0.001347 | — |
| 492 | 244711_at | 0.001155 | — |
| 492 | 215387_x_at | 5.47E−04 | — |
| 9731 | 244788_at | 7.00E−04 | — |
| 9731 | 241798_at | 0.002 | — |
| 9742 | 216448_at | 2.00E−06 | — |
| 9750 | 233412_x_at | 4.25E−04 | — |
| 9750 | 234274_at | 0.001599 | — |
| 9812 | 1561272_at | 2.15E−05 | — |
| 9831 | 234753_x_at | 1.50E−06 | — |
| 9859 | 1566715_at | 2.15E−05 | — |
| 524 | 222964_at | 4.23E−04 | — |
| 536 | 220874_at | 3.00E−06 | — |
| 483 | 1562338_at | 3.75E−04 | — |
| 9352 | 1557704_a_at | 7.00E−05 | — |
| 5731 | 232637_at | 4.00E−05 | — |
| 1043 | 215123_at | 0.001711 | 61E3.4 /// LOC100132247 /// LOC100652992 /// LOC613037 /// |
| | | | LOC728888 /// NPIPL3 |
| 6251 | 1564307_a_at | 4.36E−04 | A2ML1 |
| 5222 | 236394_at | 0.002 | A2MP1 |
| 2497 | 223593_at | 2.80E−04 | AADAT |
| 5328 | 243167_at | 8.15E−05 | ABCB5 |
| 796 | 1555323_at | 7.18E−05 | ABCB9 |
| 5652 | 242553_at | 6.00E−05 | ABCC3 |
| 5681 | 201872_s_at | 2.00E−04 | ABCE1 |
| 8303 | 209246_at | 4.82E−04 | ABCF2 |
| 5736 | 221927_s_at | 2.63E−04 | ABHD11 |
| 524 | 221815_at | 5.29E−05 | ABHD2 |
| 483 | 232862_at | 2.50E−05 | ABHD5 |
| 10151 | 216113_at | 0.001 | ABI2 |
| 8015 | 216103_at | 0.001167 | ACOT11 |
| 3465 | 1555321_at | 9.88E−05 | ACOT11 |
| 9578 | 220845_at | 1.00E−05 | ACOXL |
| 5117 | 234210_x_at | 3.00E−06 | ACTR2 |
| 4793 | 215590_x_at | 1.01E−04 | ACVR2B-AS1 |
| 2824 | 205745_x_at | 1.30E−04 | ADAM17 |
| 9573 | 1561451_a_at | 2.11E−04 | ADAM29 |
| 4793 | 233868_x_at | 0.001252 | ADAM33 |
| 4793 | 232570_s_at | 0.001302 | ADAM33 |
| 5736 | 1553234_at | 2.12E−04 | ADAMTS18 |
| 9352 | 220578_at | 1.35E−04 | ADAMTSL4 |
| 4116 | 219358_s_at | 7.88E−04 | ADAP2 |
| 5328 | 219384_s_at | 9.82E−05 | ADAT1 |
| 5736 | 235049_at | 2.54E−04 | ADCY1 |
| 559 | 213219_at | 0.001329 | ADCY2 |
| 6599 | 223781_x_at | 6.40E−04 | ADH4 |
| 2824 | 207175_at | 5.06E−05 | ADIPOQ |
| 639 | 205481_at | 1.00E−05 | ADORA1 |
| 1407 | 1555435_at | 1.57E−04 | AFF4 |
| 3588 | 1554618_at | 2.30E−05 | AGFG2 |
| 4593 | 1555610_at | 1.00E−06 | AGK |
| 559 | 223327_x_at | 2.32E−04 | AGSK1 /// LOC727751 /// LOC727849 |
| 3490 | 1563560_at | 0.002 | AHNAK |
| 1562 | 202820_at | 0.001783 | AHR |
| 796 | 212172_at | 1.91E−04 | AK2 |
| 7577 | 230630_at | 1.00E−04 | AK4 /// LOC100507855 |
| 4268 | 242515_x_at | 3.83E−04 | AKIP1 |
| 9345 | 1559982_s_at | 7.66E−05 | AKR1E2 |
| 5328 | 209646_x_at | 2.18E−04 | ALDH1B1 |
| 5328 | 211004_s_at | 7.22E−05 | ALDH3B1 |
| 796 | 243901_at | 1.27E−04 | ALDOB |
| 5731 | 1560733_at | 0.0025 | ALG5 |
| 2824 | 214707_x_at | 3.43E−04 | ALMS1 |
| 6249 | 207328_at | 0.001296 | ALOX15 |
| 4579 | 207133_x_at | 5.44E−04 | ALPK1 |
| 559 | 209425_at | 5.70E−05 | AMACR /// C1QTNF3 /// C1QTNF3-AMACR |
| 5170 | 222710_at | 1.88E−04 | AMIGO3 /// GMPPB |
| 10019 | 224667_x_at | 2.27E−04 | ANAPC16 |
| 7964 | 240363_at | 0.002 | ANK1 |
| 2110 | 1560370_x_at | 5.93E−04 | ANKH |
| 2110 | 1560369_at | 5.93E−04 | ANKH |
| 123 | 220076_at | 7.14E−05 | ANKH |
| 6375 | 210486_at | 4.67E−04 | ANKMY1 |
| 9768 | 1566147_a_at | 0.001 | ANKRD20A12P |
| 492 | 239196_at | 0.001012 | ANKRD22 |
| 5328 | 211717_at | 3.91E−05 | ANKRD40 |
| 1891 | 220144_s_at | 3.20E−06 | ANKRD5 |
| 8034 | 216601_at | 5.89E−04 | AOC4 |
| 9475 | 1555421_at | 5.42E−04 | AP1S3 |
| 1732 | 1558792_x_at | 1.79E−04 | AP2A1 |
| 3857 | 1570032_at | 2.34E−04 | AP3B2 |
| 3592 | 222517_at | 6.69E−05 | AP3M1 |
| 1562 | 235647_at | 6.66E−04 | AP4S1 |
| 2824 | 231858_x_at | 1.56E−04 | AP5B1 |
| 5491 | 1555448_at | 0.002 | AP5M1 |
| 5170 | 219706_at | 6.39E−04 | AP5S1 |
| 200 | 209913_x_at | 7.74E−05 | AP5Z1 |
| 2300 | 228101_at | 0.002 | APBA1 |
| 6249 | 212972_x_at | 0.001139 | APBB2 |
| 5328 | 210873_x_at | 4.09E−04 | APOBEC3A |
| 6249 | 206738_at | 8.89E−04 | APOC2 /// APOC4 /// APOC4-APOC2 |
| 6251 | 207262_at | 1.33E−04 | APOF |
| 5328 | 221653_x_at | 7.96E−05 | APOL2 |
| 2824 | 232814_x_at | 3.80E−05 | APOPT1 |
| 1732 | 211277_x_at | 1.70E−04 | APP |
| 416 | 215402_at | 1.14E−04 | APPBP2 |
| 6249 | 1561407_at | 0.001078 | ARAP2 |
| 379 | 225166_at | 2.00E−06 | ARHGAP18 |
| 4268 | 226056_at | 1.03E−04 | ARHGAP31 |
| 5170 | 233872_x_at | 7.66E−05 | ARHGAP5 |
| 796 | 232567_at | 4.54E−06 | ARHGAP8 /// PRR5-ARHGAP8 |
| 5170 | 1560445_x_at | 6.03E−04 | ARHGEF1 |
| 7645 | 1554703_at | 1.84E−04 | ARHGEF10 |
| 559 | 234129_at | 1.15E−04 | ARHGEF12 |
| 1043 | 217348_x_at | 1.53E−04 | ARHGEF15 |
| 5736 | 222121_at | 3.28E−04 | ARHGEF26 |
| 5736 | 233903_s_at | 4.85E−04 | ARHGEF26 |
| 4793 | 1553349_at | 1.58E−05 | ARID2 |
| 932 | 224322_at | 0.001944 | ARID4B |
| 7867 | 1555964_at | 2.55E−04 | ARL17A /// ARL17B /// LOC100294341 |
| 5889 | 213759_at | 0.0011 | ARL4C |
| 492 | 1554480_a_at | 2.67E−04 | ARMC10 |
| 345 | 234607_at | 1.00E−04 | ARRDC1 |
| 1949 | 218862_at | 2.00E−10 | ASB13 |
| 2110 | 1553253_at | 6.03E−04 | ASB16 |
| 5328 | 1560219_at | 4.29E−04 | ASB3 |
| 8965 | 219336_s_at | 0.001 | ASCC1 |
| 4253 | 221226_s_at | 0.002 | ASIC4 |
| 416 | 207288_at | 2.57E−04 | ASMTL-AS1 |
| 5170 | 241354_at | 2.24E−04 | ASMTL-AS1 |
| 5736 | 216197_at | 1.38E−04 | ATF7IP |
| 8246 | 216198_at | 3.81E−05 | ATF7IP |
| 2524 | 207728_at | 1.75E−06 | ATF7IP |
| 4906 | 231825_x_at | 6.36E−04 | ATF7IP |
| 2524 | 223677_at | 5.10E−04 | ATG10 |
| 5328 | 213026_at | 4.55E−04 | ATG12 |
| 6415 | 1553387_at | 3.00E−07 | ATM |
| 9338 | 210858_x_at | 1.28E−04 | ATM |
| 2824 | 1554631_at | 3.27E−04 | ATM |
| 6922 | 220920_at | 2.60E−05 | ATP10B |
| 6675 | 212362_at | 0.002 | ATP2A2 |
| 4579 | 222796_at | 6.44E−04 | ATP5J2-PTCD1 /// PTCD1 |
| 1340 | 1555114_at | 4.25E−04 | ATP6V0A2 |
| 663 | 212384_at | 2.55E−04 | ATP6V1G2-DDX39B /// DDX39B /// SNORD84 |
| 4808 | 214594_x_at | 4.02E−04 | ATP8B1 |
| 8303 | 1554704_at | 3.51E−04 | ATP8B3 |
| 6251 | 238723_at | 5.54E−04 | ATXN3 |
| 5328 | 233182_x_at | 1.55E−04 | ATXN3 |
| 9338 | 233333_x_at | 1.18E−04 | AVIL |
| 5736 | 1562391_at | 1.85E−04 | B3GALNT2 |
| 9354 | 1552834_at | 2.98E−06 | B3GNT6 |
| 4579 | 234938_at | 2.51E−04 | BACH1 |
| 5043 | 1555369_at | 3.05E−04 | BAGE |
| 5736 | 232885_at | 1.11E−04 | BBIP1 |
| 3620 | 232442_at | 9.24E−06 | BCAR1 |
| 4579 | 220588_at | 2.37E−04 | BCAS4 |
| 7472 | 1562313_at | 0.0011 | BCORP1 |
| 3145 | 224227_s_at | 3.00E−06 | BDP1 |
| 6064 | 224520_s_at | 3.00E−06 | BEST3 |
| 6306 | 232368_at | 8.00E−05 | BET3L |
| 5736 | 218056_at | 5.24E−04 | BFAR |
| 4793 | 230309_at | 4.25E−04 | BHMT2 |
| 483 | 210334_x_at | 2.25E−05 | BIRC5 |
| 5328 | 1569002_x_at | 1.19E−04 | BMP1 |
| 5328 | 1569001_at | 1.19E−04 | BMP1 |
| 5328 | 231873_at | 2.20E−05 | BMPR2 |
| 9041 | 1553072_at | 5.00E−09 | BNIPL |
| 1463 | 228430_at | 6.00E−04 | BOLA3-AS1 |
| 483 | 205750_at | 7.00E−05 | BPHL |
| 2824 | 208368_s_at | 1.90E−04 | BRCA2 |
| 8312 | 204520_x_at | 0.002 | BRD1 |
| 8312 | 215460_x_at | 0.002 | BRD1 |
| 345 | 242265_at | 9.72E−04 | BRD8 |
| 4104 | 225716_at | 0.003 | BRI3BP |
| 5736 | 221703_at | 3.61E−04 | BRIP1 |
| 1043 | 215349_at | 4.86E−04 | BTBD18 |
| 1043 | 217141_at | 1.10E−04 | BTBD7 |
| 3465 | 235819_at | 1.92E−04 | BTF3L4 |
| 5328 | 209770_at | 5.54E−05 | BTN3A1 |
| 8763 | 228434_at | 2.00E−04 | BTNL9 |
| 3465 | 215072_x_at | 1.77E−04 | C10orf137 |
| 3592 | 208115_x_at | 1.73E−04 | C10orf137 |
| 6674 | 1553844_a_at | 8.24E−05 | C10orf67 |
| 2244 | 1568978_s_at | 0.0022 | C11orf21 |
| 6811 | 1557801_x_at | 3.34E−04 | C11orf31 |
| 6811 | 1557799_at | 3.34E−04 | C11orf31 |
| 2541 | 1555365_x_at | 3.00E−06 | C11orf58 |
| 2541 | 1555364_at | 3.00E−06 | C11orf58 |
| 6358 | 238701_x_at | 1.34E−04 | C11orf92 |
| 5170 | 225836_s_at | 4.01E−04 | C12orf32 |
| 5328 | 1553821_at | 2.22E−04 | C12orf51 |
| 5736 | 223477_s_at | 1.48E−04 | C12orf65 |
| 2824 | 232650_at | 9.79E−05 | C12orf65 |
| 2045 | 1565765_x_at | 1.17E−04 | C13orf33 |
| 4405 | 202563_at | 2.00E−04 | C14orf1 |
| 5170 | 220084_at | 4.16E−04 | C14orf105 |
| 559 | 1553801_a_at | 3.28E−05 | C14orf126 |
| 6811 | 231859_at | 1.64E−04 | C14orf132 |
| 5328 | 1564816_at | 3.96E−05 | C14orf178 |
| 7984 | 1559097_at | 7.89E−04 | C14orf64 |
| 4808 | 1560499_at | 1.08E−04 | C14orf64 |
| 3592 | 1556588_at | 1.37E−04 | C15orf37 |
| 2108 | 232507_at | 2.70E−04 | C15orf41 |
| 8034 | 1560814_a_at | 0.00125 | C15orf57 |
| 3548 | 1558648_at | 1.00E−04 | C15orf57 |
| 3402 | 1565641_at | 0.001729 | C16orf45 |
| 483 | 1558557_at | 4.13E−05 | C16orf62 |
| 2824 | 220601_at | 2.36E−04 | C16orf70 |
| 378 | 1557206_at | 2.00E−04 | C17orf104 |
| 5328 | 1566480_x_at | 1.18E−04 | C17orf104 |
| 8453 | 1560703_at | 5.00E−05 | C17orf108 |
| 5328 | 1555981_at | 5.41E−05 | C17orf65 |
| 5569 | 221800_s_at | 0.003 | C17orf70 |
| 5569 | 228136_s_at | 0.003 | C17orf70 |
| 8453 | 225065_x_at | 6.67E−04 | C17orf76-AS1 /// SNORD49A /// SNORD49B /// SNORD65 |
| 1697 | 1553298_at | 1.00E−04 | C17orf77 |
| 7567 | 214816_x_at | 4.54E−04 | C19orf40 |
| 4579 | 224712_x_at | 4.17E−04 | C19orf42 |
| 9628 | 1553162_x_at | 5.93E−05 | C19orf55 |
| 67 | 232469_x_at | 9.47E−04 | C1orf191 |
| 5736 | 233693_at | 5.23E−05 | C1orf201 |
| 5170 | 1554246_at | 1.57E−04 | C1orf210 |
| 8936 | 1562909_at | 2.00E−04 | C1orf98 |
| 7567 | 242444_at | 2.12E−04 | C1QTNF6 |
| 9051 | 218983_at | 4.00E−05 | C1RL |
| 2089 | 233645_s_at | 2.04E−04 | C1RL |
| 4793 | 236618_at | 1.46E−04 | C20orf132 |
| 3330 | 1556721_at | 1.00E−05 | C20orf203 |
| 2300 | 231905_at | 1.00E−04 | C20orf96 |
| 4331 | 240801_at | 0.002 | C21orf37 |
| 2824 | 1557782_s_at | 3.25E−05 | C21orf49 |
| 3002 | 1553850_at | 0.001 | C21orf88 |
| 117 | 1555990_at | 5.00E−04 | C22orf42 |
| 125 | 1558756_at | 1.74E−04 | C2CD3 |
| 3330 | 220149_at | 0.00102 | C2orf54 |
| 492 | 230379_x_at | 4.35E−04 | C2orf56 |
| 492 | 1554176_a_at | 3.34E−04 | C3orf33 |
| 5328 | 220600_at | 1.45E−04 | C3orf75 |
| 5170 | 236240_at | 2.17E−04 | C4orf29 |
| 4793 | 224605_at | 1.06E−04 | C4orf3 |
| 7300 | 1565939_at | 5.50E−05 | C5orf22 |
| 560 | 1557828_a_at | 1.00E−04 | C5orf28 |
| 7984 | 1560128_x_at | 5.51E−04 | C5orf56 |
| 5638 | 1564276_at | 1.00E−05 | C5orf56 |
| 5736 | 1555095_at | 1.17E−04 | C6orf123 |
| 5328 | 238028_at | 1.89E−04 | C6orf132 |
| 5873 | 1554314_at | 4.73E−05 | C6orf141 |
| 3465 | 1553446_at | 0.001 | C6orf183 |
| 2274 | 236504_x_at | 5.00E−05 | C6orf52 |
| 9338 | 238504_at | 3.33E−04 | C6orf57 |
| 4083 | 224478_s_at | 4.00E−07 | C7orf50 |
| 3465 | 224758_at | 2.00E−04 | C7orf73 |
| 2650 | 229430_at | 1.00E−06 | C8orf46 |
| 5170 | 1564315_at | 1.29E−04 | C8orf49 |
| 6071 | 223697_x_at | 1.00E−05 | C9orf64 |
| 8270 | 238912_x_at | 5.05E−04 | C9orf85 |
| 5328 | 239222_at | 1.95E−04 | C9orf9 |
| 8015 | 221865_at | 9.67E−04 | C9orf91 |
| 5043 | 1555572_at | 2.35E−04 | CA6 |
| 8303 | 1558621_at | 1.61E−04 | CABLES1 |
| 123 | 1559420_x_at | 5.16E−04 | CACNB2 |
| 123 | 1559419_at | 5.16E−04 | CACNB2 |
| 416 | 215365_at | 3.60E−04 | CACNB2 |
| 1444 | 206384_at | 0.003 | CACNG3 |
| 9365 | 235834_at | 2.67E−04 | CALD1 |
| 2824 | 1554367_at | 1.63E−05 | CALHM1 |
| 3592 | 1566150_at | 3.97E−05 | CALML4 |
| 6456 | 229549_at | 0.001175 | CALU |
| 5328 | 243910_x_at | 2.12E−05 | CAND1 |
| 4268 | 226036_x_at | 2.06E−04 | CASP2 |
| 5170 | 211464_x_at | 7.32E−04 | CASP6 |
| 5328 | 209790_s_at | 2.43E−04 | CASP6 |
| 8147 | 213373_s_at | 2.41E−04 | CASP8 |
| 2045 | 1554786_at | 0.00152 | CASS4 |
| 5328 | 217588_at | 2.80E−05 | CATSPER2 /// CATSPER2P1 |
| 5731 | 244052_at | 0.001002 | CBR4 |
| 2045 | 1557488_at | 0.0015 | CBX3P2 |
| 5736 | 242324_x_at | 1.93E−04 | CCBE1 |
| 10019 | 1568850_at | 5.35E−06 | CCBP2 |
| 4482 | 239403_at | 0.001152 | CCDC120 |
| 8303 | 229082_at | 4.00E−06 | CCDC125 |
| 7605 | 1561477_at | 1.00E−04 | CCDC144A |
| 6249 | 237475_x_at | 8.63E−04 | CCDC152 |
| 1562 | 236900_x_at | 6.43E−04 | CCDC163P |
| 9642 | 1559003_a_at | 2.00E−04 | CCDC163P |
| 1841 | 1555443_at | 5.00E−04 | CCDC172 |
| 3020 | 1560177_at | 6.97E−05 | CCDC66 |
| 9628 | 220180_at | 1.70E−04 | CCDC68 |
| 5937 | 212886_at | 6.05E−05 | CCDC69 |
| 2045 | 228495_at | 0.00101 | CCDC75 |
| 559 | 217988_at | 2.26E−05 | CCNB1IP1 |
| 8885 | 232768_at | 3.00E−06 | CCNB2 |
| 2045 | 201974_s_at | 2.66E−04 | CCZ1 |
| 5496 | 215024_at | 0.001222 | CCZ1B |
| 6008 | 208651_x_at | 2.00E−04 | CD24 |
| 5732 | 1559583_at | 2.94E−04 | CD276 |
| 2824 | 1552509_a_at | 1.76E−04 | CD300LG |
| 9338 | 205264_at | 3.61E−04 | CD3EAP |
| 9628 | 216424_at | 2.08E−04 | CD4 |
| 5170 | 1565868_at | 5.00E−04 | CD44 |
| 2786 | 208783_s_at | 0.005 | CD46 |
| 2824 | 203507_at | 1.42E−04 | CD68 |
| 5328 | 203904_x_at | 1.26E−04 | CD82 |
| 7421 | 244352_at | 5.21E−04 | CD84 |
| 8366 | 228516_at | 1.22E−04 | CDAN1 |
| 6249 | 1564674_a_at | 4.61E−04 | CDC20B |
| 9365 | 1555346_at | 0.001444 | CDC20B |
| 3465 | 1557963_at | 2.21E−05 | CDC42BPB |
| 483 | 209057_x_at | 8.89E−04 | CDC5L |
| 5170 | 203967_at | 2.10E−04 | CDC6 |
| 5937 | 235650_at | 6.54E−04 | CDHR3 /// LOC100652903 |
| 6075 | 210965_x_at | 2.00E−06 | CDK13 |
| 10019 | 232266_x_at | 7.89E−04 | CDK13 |
| 5328 | 220039_s_at | 4.57E−05 | CDKAL1 |
| 8015 | 1561190_at | 7.57E−04 | CDKL3 |
| 5858 | 235006_at | 4.32E−04 | CDKN2AIPNL |
| 4267 | 211889_x_at | 5.00E−05 | CEACAM1 |
| 8156 | 231772_x_at | 1.89E−04 | CENPH |
| 3592 | 232065_x_at | 6.69E−04 | CENPL |
| 8224 | 232106_s_at | 0.00182 | CEP89 |
| 6251 | 223815_at | 1.04E−05 | CEP95 |
| 796 | 235918_x_at | 2.48E−04 | CEP97 |
| 5409 | 241836_x_at | 9.00E−04 | CEP97 |
| 6477 | 220335_x_at | 8.47E−05 | CES3 |
| 3548 | 1554459_s_at | 1.00E−04 | CFHR3 |
| 9338 | 211316_x_at | 8.37E−05 | CFLAR |
| 9338 | 209508_x_at | 1.87E−05 | CFLAR |
| 8306 | 243751_at | 3.60E−04 | CHD2 |
| 5328 | 231994_at | 1.88E−04 | CHDH |
| 5328 | 1559591_s_at | 2.00E−04 | CHDH |
| 2922 | 218177_at | 3.00E−04 | CHMP1B |
| 897 | 217837_s_at | 3.00E−06 | CHMP3 /// RNF103-CHMP3 |
| 3407 | 211587_x_at | 7.78E−04 | CHRNA3 |
| 5328 | 207516_at | 9.37E−05 | CHRNB4 |
| 2824 | 221164_x_at | 3.32E−04 | CHST5 |
| 2824 | 223942_x_at | 3.20E−04 | CHST5 |
| 2824 | 239053_at | 5.25E−05 | CIAO1 |
| 2824 | 217501_at | 2.74E−04 | CIAO1 |
| 5328 | 1554839_at | 2.58E−04 | CIDECP |
| 8270 | 205101_at | 0.001701 | CIITA |
| 8320 | 217598_at | 2.58E−04 | CINP |
| 285 | 219859_at | 0.00105 | CLEC4E |
| 2582 | 1555213_a_at | 7.00E−05 | CLEC7A |
| 9352 | 242287_at | 7.32E−04 | CLIP1 |
| 3964 | 1558186_s_at | 5.00E−04 | CLLU1 /// LOC100507616 |
| 5526 | 219340_s_at | 0.002 | CLN8 |
| 5328 | 219621_at | 1.23E−04 | CLSPN |
| 6846 | 220855_at | 1.00E−05 | CLTC-IT1 |
| 6381 | 234981_x_at | 0.001001 | CMBL |
| 5114 | 227522_at | 0.00102 | CMBL |
| 7567 | 1562460_at | 0.001025 | CNDP2 |
| 5170 | 217752_s_at | 5.98E−04 | CNDP2 |
| 7366 | 222959_at | 0.002 | CNGB3 |
| 5170 | 201605_x_at | 3.13E−04 | CNN2 |
| 559 | 223431_at | 1.40E−05 | CNO |
| 1043 | 206497_at | 1.60E−04 | COA1 |
| 2824 | 238863_x_at | 6.98E−05 | COG8 |
| 796 | 233109_at | 7.34E−05 | COL12A1 |
| 345 | 232638_at | 6.49E−04 | COL20A1 |
| 9002 | 221152_at | 2.87E−04 | COL8A1 |
| 8147 | 209133_s_at | 5.12E−06 | COMMD4 |
| 4267 | 1559862_at | 4.00E−06 | COPA |
| 5328 | 208684_at | 1.45E−04 | COPA |
| 1982 | 220469_at | 2.00E−05 | COPE |
| 8320 | 221550_at | 3.80E−04 | COX15 |
| 8303 | 231831_at | 1.30E−06 | COX19 |
| 492 | 242280_x_at | 4.42E−04 | CPEB4 |
| 2824 | 243403_x_at | 4.75E−05 | CPM |
| 4268 | 206100_at | 2.13E−04 | CPM |
| 6893 | 231336_at | 0.002 | CPNE4 |
| 4579 | 204920_at | 0.001492 | CPS1 |
| 7992 | 225172_at | 0.00225 | CRAMP1L |
| 5328 | 203898_at | 1.42E−04 | CRCP |
| 796 | 1569293_x_at | 7.15E−05 | CROCCP2 |
| 796 | 1569291_at | 7.15E−05 | CROCCP2 |
| 716 | 204573_at | 0.001 | CROT |
| 796 | 211286_x_at | 7.61E−05 | CSF2RA |
| 5526 | 1553871_at | 0.002 | CSNK1G2-AS1 |
| 6690 | 206075_s_at | 4.00E−05 | CSNK2A1 /// CSNK2A1P |
| 8824 | 1558493_at | 0.003 | CSTT |
| 796 | 232066_x_at | 4.36E−04 | CTBP1-AS1 |
| 5736 | 215377_at | 1.48E−04 | CTBP2 |
| 2824 | 213275_x_at | 2.90E−04 | CTSB |
| 9526 | 231234_at | 4.00E−05 | CTSC |
| 5736 | 202901_x_at | 2.92E−04 | CTSS |
| 5328 | 214782_at | 2.39E−05 | CTTN |
| 663 | 1561501_s_at | 0.003 | CTU2 |
| 416 | 206775_at | 1.49E−04 | CUBN |
| 6310 | 233568_x_at | 0.001254 | CWF19L1 |
| 5736 | 220252_x_at | 1.28E−04 | CXorf21 |
| 5328 | 228700_at | 1.61E−04 | CXorf38 |
| 5170 | 215803_at | 6.66E−05 | CXorf57 |
| 5736 | 207986_x_at | 1.87E−04 | CYB561 |
| 8303 | 201633_s_at | 0.001008 | CYB5B |
| 1047 | 1560043_at | 1.52E−04 | CYB5R1 |
| 4579 | 207780_at | 5.01E−04 | CYLC2 |
| 4579 | 217133_x_at | 3.75E−04 | CYP2B6 |
| 492 | 206755_at | 6.49E−04 | CYP2B6 |
| 2824 | 210272_at | 0.001321 | CYP2B7P1 |
| 4579 | 205998_x_at | 1.55E−04 | CYP3A4 |
| 6067 | 206515_at | 0.002 | CYP4F3 |
| 9628 | 224278_at | 3.47E−04 | CYP4F30P |
| 6698 | 216288_at | 5.08E−05 | CYSLTR1 |
| 3548 | 1559471_s_at | 3.00E−06 | D21S2088E |
| 5736 | 1562772_a_at | 2.93E−04 | DAND5 |
| 796 | 232516_x_at | 2.59E−04 | DAP3 |
| 2824 | 219290_x_at | 1.79E−04 | DAPP1 |
| 5328 | 206661_at | 8.13E−05 | DBF4B |
| 3620 | 219149_x_at | 2.76E−04 | DBR1 |
| 3465 | 205369_x_at | 2.20E−04 | DBT |
| 4793 | 244687_at | 3.59E−05 | DBT |
| 5328 | 205370_x_at | 2.18E−04 | DBT |
| 796 | 232603_at | 2.95E−04 | DCDC5 |
| 2824 | 219678_x_at | 5.78E−04 | DCLRE1C |
| 3392 | 244777_at | 4.00E−05 | DCP2 |
| 9628 | 232505_at | 1.49E−04 | DCTN2 |
| 2824 | 208674_x_at | 1.50E−04 | DDOST |
| 1890 | 216679_at | 0.002 | DDR1-AS1 |
| 5328 | 216459_x_at | 7.97E−05 | DDR1-AS1 |
| 6249 | 202577_s_at | 8.96E−04 | DDX19A |
| 5937 | 1570128_at | 2.96E−04 | DDX19A |
| 9628 | 232915_at | 2.90E−04 | DDX49 |
| 7645 | 231843_at | 9.40E−05 | DDX55 |
| 9345 | 238525_at | 1.28E−05 | DDX56 |
| 6953 | 242961_x_at | 9.00E−08 | DDX58 |
| 9628 | 223662_x_at | 0.001589 | DDX59 |
| 2824 | 207431_s_at | 8.29E−04 | DEGS1 |
| 8156 | 215058_at | 7.57E−04 | DENND5B |
| 3620 | 203277_at | 1.52E−05 | DFFA |
| 5016 | 202532_s_at | 0.002055 | DHFR |
| 8252 | 241727_x_at | 0.004 | DHFRL1 |
| 2824 | 213631_x_at | 1.35E−04 | DHODH |
| 8453 | 201789_at | 0.002 | DHRS7 |
| 3465 | 1559039_at | 2.71E−04 | DHX36 |
| 3577 | 244784_at | 0.001 | DHX57 |
| 3363 | 215541_s_at | 3.00E−06 | DIAPH1 |
| 9397 | 215529_x_at | 3.38E−05 | DIP2A |
| 1407 | 1553271_at | 0.0022 | DIP2B |
| 7009 | 1552674_at | 5.15E−05 | DIRC1 |
| 5043 | 218362_s_at | 3.97E−04 | D1S3 |
| 416 | 1565771_at | 2.63E−04 | DKFZp434E1119 |
| 10196 | 224123_at | 1.00E−04 | DKFZP434F142 |
| 416 | 1556821_x_at | 9.94E−05 | DLEU2 |
| 416 | 1556820_a_at | 9.94E−05 | DLEU2 |
| 5736 | 233056_x_at | 4.23E−04 | DLGAP4 |
| 5328 | 208386_x_at | 2.64E−05 | DMC1 |
| 5328 | 215173_at | 2.55E−05 | DNAAF1 |
| 5328 | 215840_at | 1.47E−04 | DNAH2 |
| 7214 | 216415_at | 1.00E−08 | DNAH3 |
| 5328 | 220725_x_at | 4.75E−05 | DNAH3 |
| 8994 | 1554334_a_at | 0.002 | DNAJA4 |
| 3363 | 214338_at | 0.002 | DNAJB12 |
| 8766 | 1568884_at | 3.26E−04 | DNAJC2 |
| 4247 | 234094_x_at | 0.002 | DNAJC21 |
| 8034 | 244193_at | 1.14E−04 | DNAJC22 |
| 9051 | 239065_at | 4.00E−05 | DNAJC22 |
| 5873 | 1570048_at | 1.51E−05 | DNAJC24 |
| 10019 | 1558546_at | 0.001092 | DNASE1 |
| 8312 | 241854_at | 0.002 | DNASE1 |
| 2814 | 243127_x_at | 0.001 | DNASE1 |
| 4793 | 209831_x_at | 0.00161 | DNASE2 |
| 6647 | 1560781_at | 1.78E−04 | DNHD1 |
| 4793 | 215135_at | 3.20E−04 | DNPEP |
| 2045 | 215151_at | 9.07E−04 | DOCK10 |
| 796 | 215361_at | 1.61E−04 | DOCK5 |
| 5736 | 1561276_at | 2.27E−04 | DOCK5 |
| 9352 | 213267_at | 6.03E−04 | DOPEY1 |
| 5328 | 215219_at | 6.10E−05 | DOPEY2 |
| 324 | 224196_x_at | 1.00E−04 | DPH5 |
| 324 | 219590_x_at | 1.00E−04 | DPH5 |
| 324 | 223671_x_at | 1.00E−04 | DPH5 |
| 6009 | 238012_at | 3.00E−04 | DPP7 |
| 5170 | 230018_at | 3.84E−04 | DPP9 |
| 2045 | 215102_at | 5.26E−05 | DPY19L1P1 |
| 5016 | 213391_at | 1.00E−09 | DPY19L4 |
| 3964 | 241992_at | 0.002 | DRAM1 |
| 7216 | 219512_at | 8.50E−04 | DSN1 |
| 2824 | 215810_x_at | 4.51E−04 | DST |
| 5170 | 211325_x_at | 5.70E−05 | DSTNP2 |
| 5127 | 244146_at | 9.00E−04 | DTWD1 |
| 5170 | 1565693_at | 1.04E−04 | DTYMK |
| 7815 | 1555404_a_at | 5.38E−05 | DUOXA1 |
| 9338 | 1563505_at | 8.78E−05 | DUSP16 |
| 7501 | 213848_at | 0.002 | DUSP7 |
| 4579 | 220774_at | 2.26E−04 | DYM |
| 9462 | 1556831_at | 4.00E−06 | DYNC1H1 |
| 796 | 1569843_at | 5.11E−05 | DYNC1I1 |
| 483 | 241757_x_at | 1.50E−04 | DYNC2LI1 |
| 7815 | 1562477_at | 2.78E−05 | EBF2 |
| 5736 | 211129_x_at | 3.49E−04 | EDA |
| 5736 | 211130_x_at | 2.77E−04 | EDA |
| 5736 | 211127_x_at | 2.77E−04 | EDA |
| 5736 | 226544_x_at | 1.55E−04 | EEF1E1-MUTED /// MUTED |
| 5736 | 210525_x_at | 4.14E−04 | EFCAB11 |
| 10019 | 233375_at | 1.45E−04 | EFCAB2 |
| 2958 | 233600_at | 0.00101 | EFCAB6 |
| 3297 | 208112_x_at | 5.00E−04 | EHD1 |
| 2824 | 204211_x_at | 3.66E−05 | EIF2AK2 |
| 5016 | 225164_s_at | 0.00149 | EIF2AK4 |
| 9628 | 222842_at | 9.72E−05 | EIF2C4 |
| 1407 | 242735_x_at | 6.80E−04 | ELF2 |
| 8015 | 238761_at | 2.02E−04 | ELK4 |
| 2536 | 205994_at | 5.00E−04 | ELK4 |
| 7454 | 226502_at | 2.00E−04 | ELMOD2 |
| 921 | 212394_at | 1.21E−04 | EMC1 |
| 8246 | 1569868_s_at | 0.00146 | EME2 |
| 5328 | 221980_at | 1.09E−04 | EMILIN2 |
| 790 | 1563471_at | 4.00E−05 | EPG5 |
| 345 | 211164_at | 6.11E−04 | EPHA3 |
| 9033 | 209588_at | 0.001 | EPHB2 |
| 8147 | 232896_at | 2.73E−04 | ERBB21P |
| 3465 | 215606_s_at | 4.83E−05 | ERC1 |
| 1043 | 208247_at | 5.27E−04 | ERC2-IT1 |
| 5328 | 224024_at | 7.68E−05 | ERG1C1 |
| 1043 | 214372_x_at | 4.51E−04 | ERN2 |
| 3620 | 1562777_at | 5.03E−05 | ERV3-1 |
| 3509 | 215594_at | 4.00E−05 | ERV9-1 |
| 8900 | 1555753_x_at | 5.00E−04 | ERVH-6 |
| 5053 | 1555299_s_at | 4.00E−10 | ERVW-1 |
| 5053 | 1553352_x_at | 4.00E−10 | ERVW-1 |
| 9628 | 1564473_at | 1.72E−04 | ESCO2 |
| 6358 | 211627_x_at | 4.00E−08 | ESR1 |
| 796 | 1569554_at | 2.43E−05 | ESR2 |
| 5736 | 220838_at | 9.22E−05 | EXD3 |
| 9338 | 1559044_at | 1.42E−04 | EXOSC1 |
| 9475 | 209527_at | 7.85E−05 | EXOSC2 |
| 4972 | 1556436_at | 2.04E−04 | EXTL3-AS1 |
| 5316 | 203989_x_at | 2.07E−04 | F2R |
| 5873 | 206795_at | 1.71E−04 | F2RL2 |
| 504 | 204713_s_at | 3.00E−06 | F5 |
| 5328 | 1566123_at | 1.86E−05 | FABP6 |
| 2824 | 208963_x_at | 4.33E−05 | FADS1 /// MIR1908 |
| 2536 | 212106_at | 5.00E−04 | FAF2 |
| 796 | 1558976_x_at | 2.52E−04 | FAM100A |
| 796 | 1558975_at | 2.52E−04 | FAM100A |
| 4814 | 220575_at | 5.44E−04 | FAM106A |
| 7645 | 227551_at | 2.55E−04 | FAM108B1 |
| 8324 | 204403_x_at | 7.48E−04 | FAM115A /// LOC100294033 |
| 4386 | 221233_s_at | 0.002 | FAM135A |
| 2188 | 213458_at | 6.00E−05 | FAM149B1 |
| 3588 | 1555379_at | 1.12E−04 | FAM159A |
| 5526 | 222929_at | 4.50E−05 | FAM160B2 |
| 5526 | 222928_s_at | 4.50E−05 | FAM160B2 |
| 345 | 242608_x_at | 2.22E−04 | FAM161B |
| 2339 | 1553909_x_at | 0.001667 | FAM178A |
| 2667 | 1563638_at | 2.00E−04 | FAM18A |
| 5328 | 242945_at | 1.21E−04 | FAM20A |
| 5016 | 230739_at | 0.001623 | FAM210A |
| 10019 | 1553811_at | 5.84E−04 | FAM222A-AS1 |
| 9345 | 216786_at | 2.85E−04 | FAM224A |
| 8699 | 231880_at | 0.00194 | FAM40B |
| 5736 | 217535_at | 2.34E−04 | FAM49B |
| 5736 | 217534_at | 2.40E−04 | FAM49B |
| 9338 | 226062_x_at | 3.67E−04 | FAM63A |
| 4972 | 222194_at | 1.66E−04 | FAM66D |
| 7605 | 1568891_x_at | 0.002 | FANCD2 |
| 7605 | 1568889_at | 0.002 | FANCD2 |
| 123 | 220255_at | 4.13E−04 | FANCE |
| 3548 | 231971_at | 1.00E−05 | FANCM |
| 9365 | 220896_at | 7.12E−04 | FBXL18 |
| 4331 | 1553361_x_at | 0.00182 | FBXL18 |
| 4331 | 1553359_at | 0.00182 | FBXL18 |
| 7191 | 237036_at | 1.70E−06 | FBXO10 |
| 8303 | 220233_at | 5.51E−04 | FBXO17 /// SARS2 |
| 9620 | 1559566_at | 8.00E−06 | FBXO42 |
| 4793 | 212991_at | 6.02E−05 | FBXO9 |
| 6774 | 1564138_at | 0.001 | FBXW12 |
| 5328 | 215600_x_at | 2.91E−05 | FBXW12 |
| 5170 | 231883_at | 3.71E−04 | FBXW8 |
| 115 | 211305_x_at | 1.54E−04 | FCAR |
| 5937 | 241954_at | 5.86E−04 | FDFT1 |
| 363 | 239161_at | 4.00E−04 | FDX1 |
| 7547 | 213341_at | 1.00E−05 | FEM1C |
| 9338 | 205973_at | 3.45E−04 | FEZ1 |
| 5328 | 215602_at | 5.74E−05 | FGD2 |
| 8766 | 207822_at | 2.05E−04 | FGFR1 |
| 2824 | 215404_x_at | 1.80E−04 | FGFR1 |
| 5736 | 214124_x_at | 2.33E−04 | FGFR1OP |
| 3465 | 232186_at | 5.29E−04 | FITM2 |
| 2113 | 224284_x_at | 8.97E−06 | FKSG49 |
| 2113 | 224288_x_at | 6.77E−05 | FKSG49 |
| 186 | 211454_x_at | 2.00E−07 | FKSG49 |
| 3822 | 208120_x_at | 1.33E−04 | FKSG49 /// LOC100506290 /// LOC100653153 |
| 7645 | 1552664_at | 1.71E−04 | FLCN |
| 8269 | 215645_at | 6.74E−04 | FLCN |
| 3465 | 217342_x_at | 1.14E−04 | FLJ11292 |
| 1562 | 220529_at | 7.42E−04 | FLJ11710 |
| 5736 | 233210_at | 5.22E−05 | FLJ12120 |
| 7300 | 1570414_x_at | 2.08E−05 | FLJ13197 |
| 9345 | 1559011_at | 1.19E−05 | FLJ13773 |
| 416 | 220401_at | 0.001067 | FLJ21369 |
| 8355 | 234216_at | 0.002 | FLJ21408 |
| 1043 | 234627_at | 9.81E−05 | FLJ21408 |
| 559 | 1553258_at | 2.76E−05 | FLJ30679 |
| 5736 | 1557472_a_at | 4.48E−04 | FLJ30838 |
| 5736 | 1561099_at | 2.35E−04 | FLJ32756 |
| 2824 | 235628_x_at | 2.17E−04 | FLJ33630 |
| 2824 | 1566760_at | 1.80E−05 | FLJ34208 |
| 2045 | 1564208_x_at | 3.51E−04 | FLJ35390 |
| 5043 | 1569090_x_at | 5.95E−04 | FLJ35390 |
| 2045 | 1569089_a_at | 8.02E−04 | FLJ35390 /// LOC100506683 |
| 3952 | 1559277_at | 1.00E−08 | FLJ35700 |
| 1439 | 1564413_at | 7.30E−04 | FLJ36116 |
| 932 | 231882_at | 9.75E−05 | FLJ39632 |
| 796 | 1553145_at | 1.00E−04 | FLJ39653 |
| 5328 | 220352_x_at | 2.25E−04 | FLJ42627 |
| 4253 | 227129_x_at | 0.002 | FLJ45340 |
| 719 | 225899_x_at | 5.50E−05 | FLJ45340 /// FLJ45445 /// LOC100128326 /// LOC100132050 /// |
| | | | LOC100287894 /// LOC100289306 /// LOC100506479 /// LOC100508632 |
| | | | /// LOC100652945 /// LOC100653241 /// LOC100653346 /// LOC729737 |
| 6251 | 1565786_x_at | 4.89E−05 | FLJ45482 |
| 2045 | 1558148_x_at | 0.00168 | FLJ90757 |
| 5309 | 1566558_x_at | 5.00E−04 | FLJ90757 |
| 5016 | 1569688_at | 0.004 | FMO5 |
| 5496 | 1558199_at | 0.001243 | FN1 |
| 2824 | 242472_x_at | 2.05E−04 | FNBP4 |
| 5170 | 235101_at | 0.001185 | FNBP4 |
| 2045 | 230808_at | 6.11E−04 | FNTA |
| 5016 | 1555305_at | 0.001241 | FOXJ2 |
| 1717 | 232096_x_at | 1.00E−05 | FOXP1-IT1 |
| 10019 | 233106_at | 1.57E−04 | FRMD6-AS1 |
| 7984 | 1562650_at | 3.20E−04 | FRYL |
| 1046 | 244419_at | 0.00105 | FRZB |
| 8147 | 233741_at | 1.86E−04 | FTCD |
| 5016 | 231108_at | 0.001515 | FUS |
| 7421 | 210608_s_at | 0.002056 | FUT2 |
| 796 | 214088_s_at | 1.34E−05 | FUT3 |
| 9020 | 1565661_x_at | 1.00E−04 | FUT6 |
| 9020 | 1565660_at | 1.00E−04 | FUT6 |
| 8058 | 209415_at | 0.002 | FZR1 |
| 8892 | 223255_at | 0.001765 | G2E3 |
| 1129 | 1557350_at | 7.55E−04 | G3BP1 |
| 9397 | 222187_x_at | 2.59E−04 | G3BP1 |
| 9338 | 206952_at | 1.59E−04 | G6PC |
| 8386 | 202812_at | 1.00E−05 | GAA |
| 4579 | 219815_at | 4.72E−04 | GAL3ST4 |
| 9731 | 203398_s_at | 2.00E−05 | GALNT3 |
| 5170 | 219956_at | 4.53E−04 | GALNT6 |
| 5115 | 219110_at | 0.002 | GAR1 |
| 559 | 210005_at | 6.50E−04 | GART |
| 559 | 224841_x_at | 0.0025 | GAS5 /// SNORD44 /// SNORD47 /// SNORD76 /// SNORD77 /// |
| | | | SNORD79 /// SNORD80 /// SNORD81 |
| 559 | 224741_x_at | 0.0025 | GAS5 /// SNORD44 /// SNORD47 /// SNORD76 /// SNORD77 /// |
| | | | SNORD79 /// SNORD80 /// SNORD81 |
| 8830 | 214718_at | 0.003 | GATAD1 |
| 7678 | 216733_s_at | 3.00E−06 | GATM |
| 6515 | 235175_at | 5.89E−05 | GBP4 |
| 2824 | 1560227_at | 7.32E−05 | GDPD1 |
| 7944 | 1554670_at | 4.00E−05 | GGA1 |
| 9365 | 1554419_x_at | 6.90E−04 | GGNBP2 |
| 8303 | 233837_at | 4.32E−04 | GGT1 |
| 559 | 237052_x_at | 0.00167 | GIGYF2 |
| 5043 | 1552318_at | 1.41E−04 | GIMAP1 |
| 9628 | 240778_at | 2.29E−04 | GINS4 |
| 6878 | 234116_at | 7.00E−04 | GJD4 |
| 3646 | 1553772_at | 1.09E−05 | GK5 |
| 483 | 214205_x_at | 6.85E−04 | GLRX3 |
| 9338 | 234918_at | 3.68E−04 | GLTSCR2 |
| 6675 | 232703_at | 2.15E−05 | GLUD1P7 |
| 9475 | 223563_at | 5.18E−04 | GNB1L |
| 2110 | 223487_x_at | 6.36E−04 | GNB4 |
| 7564 | 232043_at | 2.66E−06 | GNG7 |
| 6173 | 233544_at | 8.38E−04 | GNL1 |
| 7645 | 222109_at | 6.54E−04 | GNL3L |
| 5170 | 212959_s_at | 3.20E−04 | GNPTAB |
| 4268 | 215203_at | 9.48E−06 | GOLGA4 |
| 1043 | 1561170_at | 1.03E−05 | GOLGA6L1 /// GOLGA6L6 /// LOC440243 |
| 9395 | 208797_s_at | 5.00E−06 | GOLGA8A |
| 3465 | 213650_at | 2.00E−04 | GOLGA8A /// GOLGA8B /// LOC100508892 |
| 6249 | 217771_at | 0.001828 | GOLM1 |
| 9345 | 219846_at | 2.83E−04 | GON4L |
| 8453 | 213020_at | 1.00E−05 | GOSR1 |
| 2824 | 206681_x_at | 1.19E−04 | GP2 |
| 6442 | 206264_at | 0.0018 | GPLD1 |
| 5328 | 214605_x_at | 1.04E−04 | GPR1 |
| 5016 | 223887_at | 0.001934 | GPR132 |
| 9345 | 220901_at | 1.82E−04 | GPR157 |
| 9573 | 232350_x_at | 2.18E−04 | GPR161 |
| 9345 | 224275_at | 3.14E−04 | GPR98 |
| 3822 | 219327_s_at | 0.002 | GPRC5C |
| 2824 | 228141_at | 2.94E−04 | GPX8 |
| 3402 | 227628_at | 1.58E−04 | GPX8 |
| 264 | 1560265_at | 1.55E−04 | GRIK2 |
| 5170 | 1555375_at | 3.27E−04 | GRIK2 |
| 9345 | 1560543_at | 2.12E−05 | GRK4 |
| 6249 | 223759_s_at | 0.00108 | GSG2 |
| 1129 | 1564525_at | 1.37E−05 | GSN |
| 8991 | 217595_at | 8.31E−04 | GSPT1 |
| 9020 | 232193_at | 0.001 | GSTT1 |
| 144 | 230376_at | 2.70E−04 | GTF2A2 |
| 8702 | 202355_s_at | 0.001 | GTF2F1 |
| 5328 | 221540_x_at | 2.23E−05 | GTF2H2 /// GTF2H2B /// GTF2H2C /// GTF2H2D |
| 5937 | 222104_x_at | 8.13E−04 | GTF2H3 |
| 5736 | 232905_at | 2.91E−04 | GTF2H5 |
| 5764 | 210891_s_at | 0.003 | GTF2I /// GTF2IP1 /// LOC100093631 |
| 5328 | 1557289_s_at | 2.93E−04 | GTF2IRD2 /// GTF2IRD2B |
| 5736 | 213835_x_at | 3.10E−04 | GTPBP3 |
| 123 | 211040_x_at | 6.40E−04 | GTSE1 |
| 123 | 204318_s_at | 6.75E−04 | GTSE1 |
| 123 | 215942_s_at | 8.00E−04 | GTSE1 |
| 2824 | 1556742_at | 4.42E−04 | GUSBP1 |
| 5736 | 215202_at | 1.53E−04 | GUSBP11 |
| 7567 | 239924_at | 2.83E−07 | GUSBP11 |
| 9345 | 215599_at | 1.92E−04 | GUSBP3 /// GUSBP9 |
| 9338 | 1555685_at | 2.69E−04 | H6PD |
| 5937 | 216875_x_at | 2.83E−04 | HAB1 |
| 9338 | 220071_x_at | 1.69E−04 | HAUS2 |
| 1732 | 1555629_at | 2.10E−05 | HAVCR2 |
| 2824 | 1569503_at | 1.25E−04 | HEATR5B |
| 5937 | 1570200_at | 6.58E−04 | HELB |
| 9023 | 220085_at | 5.00E−07 | HELLS |
| 8453 | 241784_x_at | 1.00E−06 | HELQ |
| 345 | 233075_at | 0.001026 | HERC2P7 |
| 2129 | 219352_at | 0.002 | HERC6 |
| 796 | 211328_x_at | 3.65E−04 | HFE |
| 2824 | 232627_at | 4.29E−05 | HGS |
| 3396 | 230135_at | 0.001 | HHIP |
| 6385 | 220812_s_at | 0.001201 | HHLA2 |
| 6515 | 220387_s_at | 5.01E−05 | HHLA3 |
| 6515 | 234703_at | 5.01E−05 | HHLA3 |
| 6515 | 234665_x_at | 5.01E−05 | HHLA3 |
| 3465 | 1555318_at | 4.64E−05 | HIF3A |
| 6260 | 226364_at | 0.005 | HIP1 |
| 2300 | 219028_at | 0.002 | H1PK2 |
| 5016 | 1569980_x_at | 5.13E−04 | HKR1 |
| 5016 | 1569979_at | 5.13E−04 | HKR1 |
| 5736 | 208306_x_at | 6.16E−05 | HLA-DRB1 /// LOC100507709 /// LOC100507714 |
| 2824 | 200905_x_at | 8.54E−04 | HLA-E |
| 4808 | 217456_x_at | 5.94E−05 | HLA-E |
| 194 | 1562381_at | 3.33E−06 | HLA-F-AS1 |
| 1047 | 242649_x_at | 5.79E−04 | HMGN2P46 |
| 2110 | 212109_at | 9.03E−04 | HN1L |
| 9630 | 211732_x_at | 6.69E−04 | HNMT |
| 7501 | 206809_s_at | 0.002 | HNRNPA3 /// HNRNPA3P1 |
| 7501 | 206808_at | 0.002 | HNRNPA3P1 |
| 7021 | 227110_at | 0.002 | HNRNPC /// LOC100652761 /// LOC100653343 |
| 5382 | 200775_s_at | 5.50E−05 | HNRNPK /// MIR7-1 |
| 796 | 233605_x_at | 4.87E−05 | HNRNPM |
| 6249 | 1558315_s_at | 5.26E−04 | HOOK3 |
| 5328 | 1566140_at | 7.49E−05 | HOPX |
| 5889 | 229400_at | 0.0011 | HOXD10 |
| 5736 | 224592_x_at | 6.05E−04 | HP1BP3 |
| 2045 | 204544_at | 4.95E−04 | HPS5 |
| 3204 | 222881_at | 1.00E−05 | HPSE |
| 6105 | 210013_at | 2.00E−17 | HPX |
| 2300 | 212983_at | 0.002 | HRAS |
| 9628 | 221170_at | 1.10E−04 | HRH4 |
| 1043 | 223647_x_at | 9.77E−05 | HSCB |
| 7645 | 220081_x_at | 4.95E−04 | HSD17B7 |
| 123 | 223248_at | 4.44E−04 | HSDL1 |
| 4972 | 215436_at | 2.63E−04 | HSDL2 |
| 5652 | 207135_at | 7.00E−05 | HTR2A |
| 5935 | 1553706_at | 6.25E−04 | HTRA4 |
| 1043 | 217618_x_at | 1.53E−04 | HUS1 |
| 2824 | 1563529_at | 5.30E−05 | HYDIN2 |
| 10019 | 215490_at | 7.19E−04 | IBA57 |
| 7472 | 211740_at | 0.002 | ICA1 |
| 5328 | 207194_s_at | 5.62E−05 | ICAM4 |
| 7564 | 236400_at | 5.03E−04 | IDH1-AS1 |
| 5736 | 212221_x_at | 1.87E−04 | IDS |
| 6070 | 212203_x_at | 1.00E−05 | IFITM3 |
| 5328 | 232844_at | 2.52E−04 | IFT140 |
| 5679 | 223736_at | 5.24E−04 | IFT81 |
| 5937 | 1569033_at | 3.82E−04 | IGF2BP3 |
| 7815 | 230128_at | 4.00E−05 | IGLL5 |
| 5937 | 235202_x_at | 8.04E−04 | IKBIP |
| 1043 | 207433_at | 1.03E−04 | IL10 |
| 3465 | 206924_at | 2.07E−04 | IL11 |
| 8324 | 1552584_at | 2.45E−04 | IL12RB1 |
| 3465 | 206295_at | 2.18E−04 | IL18 |
| 796 | 208200_at | 1.50E−05 | IL1A |
| 8015 | 205945_at | 3.00E−04 | IL6R |
| 9378 | 218637_at | 0.002 | IMPACT |
| 8463 | 223871_x_at | 2.55E−04 | ING5 |
| 4793 | 1560558_at | 1.52E−04 | INIP |
| 439 | 221251_x_at | 0.004 | INO80B /// INO80B-WBP1 |
| 2824 | 1559716_at | 8.97E−05 | INO80C |
| 1407 | 203607_at | 3.28E−04 | INPP5F |
| 6249 | 1560172_at | 4.23E−04 | INTS10 |
| 4787 | 237504_at | 1.00E−05 | INTS10 |
| 5736 | 233193_x_at | 3.12E−04 | INTS4 |
| 8453 | 236906_x_at | 1.00E−06 | IPO5 |
| 7313 | 244703_x_at | 3.01E−04 | IPO9 |
| 5736 | 219618_at | 1.23E−04 | IRAK4 |
| 1047 | 214666_x_at | 7.55E−05 | IREB2 |
| 8015 | 239177_at | 9.90E−04 | IRGQ |
| 663 | 216502_at | 0.001342 | ISG20L2 |
| 416 | 213475_s_at | 6.07E−04 | ITGAL |
| 720 | 216261_at | 1.55E−04 | ITGB3 |
| 5043 | 1553243_at | 1.58E−04 | ITIH5 |
| 5170 | 216958_s_at | 8.40E−05 | IVD |
| 7472 | 238600_at | 0.0011 | JAKMIP1 |
| 5328 | 215233_at | 1.87E−04 | JMJD6 |
| 5016 | 232756_at | 0.001131 | KALRN |
| 5889 | 218418_s_at | 0.00135 | KANK2 |
| 7645 | 1559142_at | 2.56E−04 | KAT6A |
| 5328 | 1562236_at | 3.18E−04 | KAT6B |
| 6550 | 233649_at | 0.0015 | KATNAL2 |
| 6953 | 233644_at | 5.00E−04 | KATNAL2 |
| 5679 | 1554710_at | 7.85E−04 | KCNMB1 |
| 559 | 1557621_at | 1.56E−04 | KCP |
| 6249 | 1553136_at | 2.84E−04 | KCTD18 |
| 5114 | 228299_at | 0.002 | KCTD20 |
| 5328 | 223176_at | 1.41E−05 | KCTD20 |
| 559 | 1553717_at | 1.52E−04 | KCTD7 /// RABGEF1 |
| 7984 | 1553150_at | 6.11E−04 | KDM1B |
| 4793 | 222359_x_at | 2.34E−04 | KDSR |
| 5328 | 202714_s_at | 4.94E−05 | KIAA0391 |
| 796 | 205496_at | 6.88E−06 | KIAA0408 |
| 483 | 233915_at | 3.00E−04 | KIAA0825 |
| 3548 | 232244_at | 1.00E−05 | KIAA1161 |
| 6251 | 231856_at | 2.37E−04 | KIAA1244 |
| 123 | 232250_at | 1.14E−04 | KIAA1257 |
| 8355 | 231887_s_at | 4.00E−05 | KIAA1274 |
| 7944 | 236325_at | 0.002 | KIAA1377 |
| 8366 | 232166_at | 3.02E−04 | KIAA1377 |
| 2584 | 1554550_at | 5.00E−04 | KIAA1430 |
| 4579 | 230567_at | 8.14E−05 | KIAA1430 |
| 5016 | 213316_at | 4.00E−04 | KIAA1462 |
| 4906 | 232921_at | 2.55E−04 | KIAA1549 |
| 4888 | 221802_s_at | 0.003 | KIAA1598 |
| 6217 | 1569365_a_at | 4.00E−06 | KIAA1656 |
| 3660 | 215018_at | 0.002 | KIAA1731 |
| 4082 | 231893_at | 0.002 | KIAA1755 |
| 2110 | 243539_at | 4.97E−04 | KIAA1841 |
| 4793 | 209245_s_at | 8.11E−05 | KIF1C |
| 2824 | 211351_at | 6.27E−05 | KIF25-AS1 |
| 9628 | 203943_at | 6.25E−04 | KIF3B |
| 8314 | 216428_x_at | 5.08E−05 | KIR3DX1 |
| 5736 | 244276_at | 3.03E−04 | KLB |
| 492 | 206551_x_at | 3.08E−04 | KLHL24 |
| 5328 | 220374_at | 7.21E−05 | KLHL28 |
| 2765 | 238523_at | 2.00E−04 | KLHL36 |
| 4808 | 1560396_at | 3.38E−04 | KLHL6 |
| 8855 | 233854_x_at | 1.77E−05 | KLK4 |
| 8855 | 224062_x_at | 1.77E−05 | KLK4 |
| 1604 | 207796_x_at | 5.00E−04 | KLRD1 |
| 1738 | 216713_at | 6.91E−04 | KRIT1 |
| 2108 | 204738_s_at | 4.00E−06 | KRIT1 |
| 5328 | 232441_at | 1.65E−04 | KRR1 |
| 9276 | 237853_x_at | 4.67E−04 | KRTAP10-12 |
| 8240 | 234880_x_at | 6.73E−05 | KRTAP1-3 |
| 8242 | 233631_x_at | 1.93E−06 | KRTAP9-2 /// KRTAP9-8 |
| 559 | 233122_at | 2.38E−04 | KRTCAP2 |
| 1043 | 220089_at | 6.16E−04 | L2HGDH |
| 5736 | 217810_x_at | 1.86E−04 | LARS |
| 1043 | 211768_at | 0.001113 | LAT2 |
| 5944 | 207734_at | 6.70E−04 | LAX1 |
| 9475 | 1553888_at | 5.64E−04 | LDHAL6A |
| 194 | 202068_s_at | 1.00E−04 | LDLR |
| 7472 | 244338_at | 0.0011 | LDLRAD3 |
| 1444 | 224673_at | 0.001929 | LENG8 |
| 1444 | 1554589_at | 0.001929 | LENG9 |
| 796 | 207092_at | 4.55E−06 | LEP |
| 2824 | 222006_at | 4.58E−05 | LETM1 |
| 2824 | 1557197_a_at | 4.68E−04 | LGALS3 |
| 1732 | 232457_at | 2.54E−04 | LIMCH1 |
| 4579 | 222762_x_at | 8.70E−05 | LIMD1 |
| 5043 | 1566129_at | 2.33E−04 | LIMS1 |
| 796 | 231959_at | 1.85E−05 | LIN52 |
| 5736 | 223350_x_at | 1.38E−04 | LIN7C |
| 9628 | 1562733_at | 2.95E−04 | LINC00092 |
| 7633 | 1562802_at | 1.33E−04 | LINC00210 |
| 4793 | 210711_at | 5.25E−05 | LINC00260 |
| 614 | 1569755_at | 0.0015 | LINC00276 |
| 2824 | 221621_at | 1.23E−04 | LINC00338 /// SCARNA16 |
| 2824 | 1552979_at | 2.82E−04 | LINC00471 |
| 8147 | 1553484_at | 4.69E−05 | LINC00477 |
| 7645 | 1556072_at | 0.002 | LINC00528 |
| 416 | 232034_at | 9.52E−05 | LINC00537 |
| 5328 | 1569983_at | 2.72E−05 | LINC00566 |
| 2824 | 220904_at | 7.33E−05 | LINC00574 |
| 4331 | 1560419_at | 0.00105 | LOC100127974 |
| 7992 | 1565723_at | 3.45E−04 | LOC100128281 |
| 3465 | 233527_at | 0.00138 | LOC100129069 |
| 10019 | 244730_x_at | 7.83E−05 | LOC100129195 |
| 4808 | 221477_s_at | 2.07E−04 | LOC100129518 /// SOD2 |
| 8378 | 1559528_at | 1.00E−04 | LOC100129917 |
| 5618 | 241851_x_at | 2.16E−05 | LOC100130429 |
| 5328 | 1564021_at | 1.46E−04 | LOC100130456 |
| 9628 | 1564240_at | 2.79E−04 | LOC100130856 |
| 5736 | 233840_at | 6.16E−04 | LOC100130950 |
| 8699 | 242364_x_at | 0.00115 | LOC100131096 |
| 7645 | 1558152_at | 3.12E−04 | LOC100131262 |
| 9628 | 1568864_at | 1.51E−04 | LOC100131691 |
| 5526 | 1559180_at | 1.00E−05 | LOC100131860 |
| 6861 | 1564660_at | 1.00E−05 | LOC100131864 |
| 4253 | 234664_at | 0.001002 | LOC100132062 /// LOC100288102 /// LOC100506479 /// LOC731275 |
| 5937 | 1558527_at | 5.59E−05 | LOC100132707 |
| 8768 | 227234_at | 1.00E−06 | LOC100132815 |
| 4255 | 1565748_at | 1.13E−04 | LOC100132815 |
| 9872 | 1565746_at | 1.00E−04 | LOC100132815 |
| 7481 | 1561482_at | 0.005 | LOC100133308 |
| 5328 | 232190_x_at | 3.87E−05 | LOC100133445 /// LOC115110 |
| 5328 | 1569604_at | 1.55E−04 | LOC100133612 |
| 1353 | 232579_at | 2.63E−05 | LOC100134229 |
| 5865 | 229930_at | 0.003 | LOC100134361 |
| 4331 | 1569270_at | 1.95E−04 | LOC100134368 |
| 5736 | 231886_at | 8.39E−05 | LOC100134822 |
| 1732 | 211050_x_at | 6.15E−04 | LOC100134822 /// LOC100288069 /// LOC100653347 |
| 5736 | 232731_x_at | 5.89E−05 | LOC100190938 |
| 2824 | 233174_at | 1.23E−04 | LOC100287015 |
| 9475 | 240617_at | 1.39E−04 | LOC100287098 |
| 6385 | 233997_at | 0.001456 | LOC100287166 |
| 2136 | 217220_at | 6.81E−04 | LOC100287387 |
| 9381 | 230606_at | 7.00E−05 | LOC100287525 |
| 8885 | 1569446_x_at | 4.00E−05 | LOC100287576 /// LOC100506454 |
| 2824 | 214871_x_at | 4.19E−04 | LOC100287590 |
| 5736 | 1562095_at | 3.38E−04 | LOC100287789 /// SLMAP |
| 7908 | 214870_x_at | 6.67E−13 | LOC100288332 /// LOC100506193 /// LOC642778 /// LOC642799 /// |
| | | | NPIP /// PKD1P1 |
| 7908 | 221501_x_at | 6.67E−13 | LOC100288332 /// LOC642778 /// LOC642799 /// PKD1P1 |
| 5736 | 233775_x_at | 1.33E−04 | LOC100289333 |
| 5170 | 232420_x_at | 4.74E−04 | LOC100289341 |
| 9515 | 1564639_at | 2.02E−05 | LOC100291323 |
| 3407 | 1569378_at | 2.41E−05 | LOC100292680 |
| 932 | 214809_at | 2.76E−04 | LOC100294145 |
| 5328 | 1569078_at | 5.58E−05 | LOC100294362 |
| 6493 | 222947_at | 4.00E−07 | LOC100379224 |
| 3426 | 1564463_at | 2.67E−04 | LOC100499221 |
| 663 | 238901_at | 4.36E−04 | LOC100505633 |
| 2824 | 1557068_at | 1.14E−04 | LOC100505782 |
| 3212 | 1558906_a_at | 2.70E−04 | LOC100505783 |
| 5736 | 1569004_at | 2.76E−04 | LOC100505812 |
| 7988 | 233307_x_at | 5.30E−04 | LOC100505828 /// MGST3 |
| 9628 | 1557004_at | 2.73E−05 | LOC100505902 /// LOC285389 |
| 4268 | 232790_at | 0.002033 | LOC100506054 |
| 7567 | 229296_at | 1.29E−04 | LOC100506119 |
| 6429 | 202477_s_at | 0.002 | LOC100506167 /// TUBGCP2 |
| 2824 | 217625_x_at | 5.15E−04 | LOC100506190 |
| 1211 | 235282_at | 1.00E−06 | LOC100506295 |
| 483 | 1560679_at | 5.40E−05 | LOC100506328 |
| 8355 | 244366_at | 4.00E−05 | LOC100506371 |
| 9338 | 232804_at | 1.60E−04 | LOC100506385 |
| 8303 | 1570350_at | 1.04E−06 | LOC100506403 /// RUNX1 |
| 3465 | 242358_at | 6.42E−05 | LOC100506451 |
| 1043 | 1564232_at | 2.72E−04 | LOC100506453 /// LOC441528 |
| 416 | 222280_at | 1.56E−04 | LOC100506469 |
| 10019 | 224766_at | 6.56E−04 | LOC100506548 /// RPL37 |
| 9475 | 1556235_at | 5.28E−04 | LOC100506560 /// LOC100509195 |
| 2584 | 232070_at | 0.002 | LOC100506639 |
| 3577 | 237844_at | 0.001 | LOC100506639 /// ZNF131 |
| 6599 | 232822_x_at | 5.00E−04 | LOC100506757 |
| 1562 | 1568722_at | 6.63E−04 | LOC100506832 |
| 4621 | 232131_at | 2.78E−04 | LOC100506874 |
| 5328 | 243924_at | 2.17E−05 | LOC100506930 |
| 1968 | 1559546_s_at | 1.00E−05 | LOC100506948 /// SNORD107 /// SNORD115-13 /// SNORD115-26 /// |
| | | | SNORD115-7 /// SNORD116-28 /// SNRPN |
| 5873 | 1559169_at | 2.64E−05 | LOC100507013 |
| 796 | 1566152_a_at | 1.67E−04 | LOC100507106 |
| 1241 | 1563776_at | 3.00E−06 | LOC100507283 |
| 1094 | 229189_s_at | 3.00E−16 | LOC100507376 |
| 1094 | 229190_at | 3.00E−16 | LOC100507376 |
| 6953 | 224006_at | 5.05E−06 | LOC100507377 |
| 6762 | 210553_x_at | 0.002 | LOC100507472 /// PCSK6 |
| 2824 | 235617_x_at | 4.19E−05 | LOC100507537 |
| 1047 | 204861_s_at | 6.32E−04 | LOC100509323 /// NAIP |
| 3588 | 232502_at | 8.51E−04 | LOC100652735 /// LOC100653122 /// LOC728558 |
| 3465 | 239168_at | 4.91E−05 | LOC100652811 /// LOC100653083 /// LOC150622 /// LOC400940 |
| 559 | 222499_at | 7.89E−04 | LOC100652993 /// LOC100653136 /// MRPS16 |
| 6249 | 220983_s_at | 4.51E−04 | LOC100653017 /// MIR612 /// NEAT1 |
| 4331 | 225239_at | 1.76E−04 | LOC100653017 /// MIR612 /// NEAT1 |
| 8303 | 215709_at | 1.60E−06 | LOC100653079 /// PRIM2 |
| 4813 | 242904_x_at | 7.00E−07 | LOC100653229 |
| 7351 | 1558202_at | 1.00E−05 | LOC145783 |
| 3592 | 235014_at | 3.93E−04 | LOC147727 |
| 5937 | 1558577_at | 2.81E−04 | LOC148709 |
| 3465 | 1561059_a_at | 3.87E−04 | LOC152024 |
| 4793 | 1562048_at | 6.73E−06 | LOC152225 |
| 8246 | 232645_at | 4.80E−04 | LOC153684 |
| 4620 | 1556224_a_at | 1.00E−10 | LOC155060 /// ZNF783 |
| 4267 | 1563827_at | 3.28E−04 | LOC158434 |
| 1353 | 1556898_at | 2.78E−05 | LOC200830 |
| 5170 | 235587_at | 1.04E−04 | LOC202781 |
| 9035 | 232294_at | 1.00E−05 | LOC219347 |
| 378 | 1569722_s_at | 0.0013 | LOC219731 |
| 2824 | 233013_x_at | 1.57E−05 | LOC220906 |
| 6953 | 232772_at | 9.00E−08 | LOC221272 |
| 9343 | 241249_at | 0.002 | LOC253039 |
| 807 | 1563074_at | 1.00E−12 | LOC255654 |
| 7009 | 215302_at | 5.33E−06 | LOC257152 |
| 2584 | 1556319_at | 0.001002 | LOC283270 |
| 2824 | 1566734_at | 2.63E−04 | LOC283454 |
| 7472 | 1561442_at | 0.0011 | LOC283585 |
| 1958 | 1561518_at | 2.50E−07 | LOC283914 |
| 2824 | 1558723_at | 8.51E−05 | LOC284014 |
| 559 | 1569006_at | 1.13E−04 | LOC284379 |
| 8156 | 1560390_s_at | 0.0021 | LOC284440 |
| 3402 | 1569318_at | 8.02E−04 | LOC284440 |
| 3592 | 1555363_s_at | 2.35E−04 | LOC284440 |
| 2045 | 235317_at | 5.25E−05 | LOC284454 |
| 416 | 1562051_at | 1.00E−04 | LOC284757 /// LOC729296 |
| 5736 | 1563680_at | 2.59E−04 | LOC284950 |
| 9040 | 1563691_at | 0.001 | LOC285300 |
| 2739 | 1569781_at | 5.00E−04 | LOC285423 |
| 9338 | 1563571_at | 1.88E−04 | LOC285463 |
| 123 | 1561566_at | 2.53E−04 | LOC285501 |
| 6188 | 1559479_at | 5.00E−04 | LOC285540 |
| 1177 | 1563489_at | 1.15E−05 | LOC285638 |
| 8453 | 1553335_x_at | 4.00E−06 | LOC285696 |
| 7547 | 234147_at | 5.00E−04 | LOC286059 |
| 6249 | 1562365_at | 2.57E−04 | LOC286177 |
| 1792 | 1560202_at | 1.00E−06 | LOC338739 |
| 6173 | 1564360_a_at | 2.68E−05 | LOC339260 |
| 483 | 227940_at | 8.19E−04 | LOC339803 |
| 416 | 232455_x_at | 3.24E−04 | LOC340085 |
| 5328 | 1560119_at | 4.70E−05 | LOC389634 |
| 559 | 222196_at | 1.73E−05 | LOC389906 |
| 7908 | 214035_x_at | 0.001 | LOC399491 |
| 133 | 1558075_at | 1.49E−05 | LOC399491 |
| 8252 | 232965_at | 0.004 | LOC400684 |
| 492 | 1569213_at | 6.35E−04 | LOC400891 |
| 7472 | 1570006_at | 6.00E−04 | LOC400958 |
| 115 | 1556609_at | 0.001274 | LOC401098 |
| 6846 | 241972_at | 1.00E−05 | LOC401588 |
| 6251 | 1569823_at | 5.95E−04 | LOC440346 |
| 5328 | 215678_at | 2.52E−05 | LOC440792 |
| 719 | 227922_x_at | 1.00E−05 | LOC441124 |
| 1034 | 215297_at | 1.00E−05 | LOC441204 |
| 5736 | 232918_at | 4.04E−04 | LOC541471 |
| 2824 | 215625_at | 1.55E−05 | LOC644450 |
| 10096 | 235884_at | 0.002 | LOC644794 |
| 6267 | 1555400_at | 7.51E−07 | LOC645261 |
| 4292 | 1568933_at | 2.48E−06 | LOC646627 |
| 796 | 215467_x_at | 1.87E−04 | LOC647070 |
| 614 | 1561492_at | 3.00E−06 | LOC647107 |
| 3588 | 240371_at | 0.002 | LOC647107 |
| 796 | 1558028_x_at | 2.74E−04 | LOC647979 |
| 9628 | 1562428_at | 9.20E−04 | LOC654780 |
| 9573 | 1564559_at | 5.12E−04 | LOC728073 |
| 2145 | 234133_s_at | 5.40E−04 | LOC728543 |
| 1599 | 1568764_x_at | 0.002 | LOC728613 /// PDCD6 |
| 1599 | 1568762_at | 0.002 | LOC728613 /// PDCD6 |
| 5170 | 1563978_at | 1.41E−04 | LOC728690 |
| 5170 | 213388_at | 3.09E−04 | LOC728802 /// PDE4DIP |
| 1145 | 1558623_at | 1.00E−09 | LOC729121 |
| 483 | 220823_at | 0.00115 | LOC729164 |
| 6251 | 1563637_at | 2.69E−06 | LOC729652 |
| 1101 | 241607_at | 0.002 | LOC730102 |
| 2135 | 1561571_at | 3.00E−06 | LOC730139 |
| 959 | 1556117_at | 5.50E−05 | LOC79015 |
| 559 | 233321_x_at | 1.25E−04 | LOC90834 |
| 5736 | 234341_x_at | 6.63E−04 | LOC91548 |
| 5873 | 233132_at | 1.02E−04 | LOC96610 |
| 5328 | 215322_at | 5.28E−05 | LONRF1 |
| 5328 | 202793_at | 1.04E−04 | LPCAT3 |
| 6131 | 242778_at | 3.50E−04 | LPXN |
| 1594 | 230863_at | 2.00E−04 | LRP2 |
| 5328 | 231781_s_at | 9.34E−05 | LRRC2 |
| 6740 | 215063_x_at | 0.001467 | LRRC40 |
| 5732 | 211452_x_at | 5.12E−04 | LRRFIP1 |
| 5328 | 215375_x_at | 8.92E−05 | LRRFIP1 |
| 8366 | 232705_at | 4.00E−05 | LRRFIP2 |
| 3465 | 223817_at | 7.94E−06 | LRRIQ1 |
| 2824 | 216167_at | 3.30E−04 | LRRN2 |
| 7009 | 221536_s_at | 3.00E−06 | LSG1 |
| 174 | 236363_at | 6.00E−04 | LSM3 |
| 7567 | 202903_at | 8.64E−04 | LSM5 |
| 2497 | 243852_at | 0.001025 | LUC7L2 |
| 7313 | 227797_x_at | 0.002 | LYRM2 |
| 9338 | 231840_x_at | 1.35E−04 | LYRM7 |
| 3592 | 232168_x_at | 5.78E−04 | MACF1 |
| 5328 | 1553407_at | 2.06E−04 | MACF1 |
| 5170 | 1559731_x_at | 3.43E−04 | MACROD1 |
| 123 | 205193_at | 7.14E−04 | MAFF |
| 4793 | 1559352_a_at | 5.03E−05 | MAFG-AS1 |
| 5930 | 224650_at | 0.002 | MAL2 |
| 8965 | 217282_at | 0.001 | MAN1A2 |
| 2824 | 220945_x_at | 1.37E−04 | MANSC1 |
| 9338 | 221697_at | 7.36E−05 | MAP1LC3C |
| 9338 | 216206_x_at | 3.53E−05 | MAP2K7 |
| 492 | 206296_x_at | 7.52E−04 | MAP4K1 |
| 10081 | 210059_s_at | 0.003 | MAPK13 |
| 10081 | 210058_at | 0.003 | MAPK13 |
| 3465 | 1553987_at | 3.25E−04 | MAPKAPK5-AS1 |
| 2108 | 232537_x_at | 1.50E−05 | MARK3 |
| 6673 | 235955_at | 1.26E−04 | MARVELD2 |
| 5328 | 206091_at | 2.28E−05 | MATN3 |
| 560 | 242260_at | 0.00105 | MATR3 |
| 6249 | 228012_at | 0.001618 | MATR3 /// SNHG4 |
| 345 | 242077_x_at | 3.03E−04 | MB21D1 |
| 10016 | 241813_at | 5.00E−05 | MBD1 |
| 6251 | 207115_x_at | 3.01E−04 | MBTD1 |
| 7331 | 211042_x_at | 0.003 | MCAM |
| 5328 | 210869_s_at | 1.30E−04 | MCAM |
| 9345 | 1560033_at | 8.58E−05 | MCCC2 |
| 5328 | 215112_x_at | 1.68E−04 | MCF2L2 |
| 5016 | 1559309_at | 0.001703 | MCFD2 |
| 5732 | 215582_x_at | 3.39E−04 | MCM3AP |
| 6249 | 1560542_at | 8.10E−04 | MCM3AP-AS1 |
| 9378 | 222036_s_at | 0.002 | MCM4 |
| 2340 | 229021_at | 9.49E−04 | MCTP2 |
| 6713 | 229711_s_at | 3.00E−06 | MDM2 |
| 7992 | 205386_s_at | 9.91E−04 | MDM2 |
| 1047 | 244616_x_at | 8.50E−04 | MDM2 |
| 5316 | 1562731_s_at | 2.01E−09 | MDS2 |
| 8147 | 219730_at | 2.76E−05 | MED18 |
| 3402 | 221650_s_at | 0.001714 | MED18 |
| 6846 | 225708_at | 1.00E−04 | MED29 |
| 2824 | 208262_x_at | 3.05E−04 | MEFV |
| 9352 | 1569402_at | 5.50E−05 | MEIS3 |
| 1047 | 224672_x_at | 8.13E−04 | MESDC2 |
| 3465 | 238931_at | 1.60E−05 | METTL16 |
| 1043 | 1554582_a_at | 1.59E−04 | METTL20 |
| 416 | 233742_at | 1.01E−04 | METTL22 |
| 4267 | 242111_at | 3.00E−06 | METTL3 |
| 9365 | 1557991_at | 0.001073 | METTL6 |
| 2824 | 1553688_at | 1.37E−04 | METTL6 |
| 1717 | 211424_x_at | 1.43E−04 | METTL7A |
| 1717 | 209703_x_at | 1.43E−04 | METTL7A |
| 5873 | 221192_x_at | 1.74E−04 | MFSD11 |
| 7300 | 224134_at | 8.08E−06 | MGC10814 |
| 7214 | 1560019_at | 2.00E−07 | MGC11082 |
| 3465 | 211386_at | 3.07E−04 | MGC12488 |
| 5170 | 211775_x_at | 4.01E−04 | MGC13053 |
| 9397 | 1553881_at | 5.42E−05 | MGC16142 |
| 2824 | 1558167_a_at | 1.51E−04 | MGC16275 |
| 2824 | 208136_s_at | 1.33E−04 | MGC3771 |
| 4089 | 219332_at | 1.00E−08 | MICALL2 |
| 416 | 206247_at | 9.68E−05 | MICB |
| 492 | 243760_at | 0.001348 | MIPEPP3 |
| 5043 | 1569348_at | 2.92E−04 | MIR4500HG /// TPTEP1 |
| 2824 | 212594_at | 1.92E−05 | MIR4680 /// PDCD4 |
| 1043 | 232169_x_at | 2.20E−04 | MIR4691 /// NDUFS8 |
| 9338 | 206500_s_at | 1.03E−04 | MIS18BP1 |
| 4409 | 226066_at | 0.002 | MITF |
| 6431 | 234167_at | 4.00E−05 | MKI67IP |
| 5736 | 1560145_at | 7.24E−05 | MKLN1 |
| 5170 | 206426_at | 3.76E−04 | MLANA |
| 796 | 205989_s_at | 1.25E−05 | MOG |
| 5328 | 214650_x_at | 7.80E−05 | MOG |
| 5043 | 1559167_x_at | 0.001005 | MPV17L |
| 5937 | 210224_at | 6.55E−04 | MR1 |
| 4331 | 210528_at | 9.80E−04 | MR1 |
| 115 | 223770_x_at | 2.61E−05 | MRI1 |
| 3465 | 204387_x_at | 7.45E−05 | MRP63 |
| 6092 | 213897_s_at | 1.00E−21 | MRPL23 |
| 2045 | 1562392_at | 0.001331 | MRPL23 |
| 9345 | 1554468_s_at | 3.79E−05 | MRPL38 |
| 5328 | 218202_x_at | 8.90E−05 | MRPL44 |
| 921 | 215919_s_at | 5.00E−09 | MRPS11 |
| 9477 | 224015_s_at | 0.001875 | MRPS25 |
| 4793 | 235783_at | 1.86E−05 | MRTO4 |
| 2824 | 205887_x_at | 1.85E−04 | MSH3 |
| 7421 | 227277_at | 1.35E−04 | MTDH |
| 4579 | 234976_x_at | 1.59E−04 | MTHFD2 |
| 5170 | 1562644_at | 4.93E−05 | MTHFD2L |
| 5969 | 228789_at | 8.00E−07 | MTMR6 |
| 4331 | 233873_x_at | 4.00E−04 | MTPAP |
| 559 | 215560_x_at | 2.91E−04 | MTRF1L |
| 9338 | 217295_at | 3.22E−06 | MUC8 |
| 2256 | 36907_at | 5.00E−04 | MVK |
| 2256 | 204056_s_at | 5.00E−04 | MVK |
| 1562 | 216188_at | 0.001114 | MYCNOS |
| 5170 | 201497_x_at | 2.48E−04 | MYH11 |
| 6717 | 224823_at | 0.002 | MYLK |
| 279 | 1568926_x_at | 0.003 | MYLK3 |
| 279 | 1568925_at | 0.003 | MYLK3 |
| 9403 | 214656_x_at | 1.00E−07 | MYO1C |
| 66 | 244654_at | 6.93E−04 | MYO1G |
| 4236 | 227799_at | 1.00E−06 | MYO1G |
| 6249 | 242512_at | 0.001696 | MYO9A |
| 5328 | 220720_x_at | 2.83E−04 | MZT2B |
| 2168 | 231039_at | 0.002 | NAA30 |
| 7864 | 218661_at | 3.00E−06 | NAA60 |
| 7864 | 45526_g_at | 3.00E−06 | NAA60 |
| 8835 | 215178_x_at | 1.00E−04 | NAAA |
| 8104 | 216017_s_at | 0.001 | NAB2 |
| 5736 | 211445_x_at | 1.44E−04 | NACAP1 |
| 790 | 1554702_at | 7.50E−06 | NALCN |
| 1407 | 241923_x_at | 2.88E−04 | NANS |
| 9352 | 238722_x_at | 1.20E−04 | NAPEPLD |
| 8015 | 1564658_at | 3.30E−04 | NAT16 |
| 2045 | 233870_at | 6.00E−05 | NAV1 |
| 7645 | 216466_at | 2.36E−04 | NAV3 |
| 3210 | 1553910_at | 1.00E−05 | NBPF4 |
| 115 | 207631_at | 2.91E−05 | NBR2 |
| 4793 | 216114_at | 6.50E−05 | NCKIPSD |
| 2824 | 215857_at | 4.86E−05 | NCLN |
| 2168 | 207760_s_at | 6.00E−04 | NCOR2 |
| 8892 | 207860_at | 5.08E−04 | NCR1 |
| 1943 | 230219_at | 5.00E−04 | NDE1 |
| 5328 | 215850_s_at | 3.00E−05 | NDUFA5 |
| 378 | 243630_at | 3.00E−04 | NDUFB1 |
| 3592 | 222521_x_at | 5.90E−04 | NDUFC2 /// NDUFC2-KCTD14 |
| 5736 | 239268_at | 4.31E−04 | NDUFS1 |
| 8303 | 229647_at | 5.00E−04 | NDUFS1 |
| 6846 | 1564093_at | 0.001687 | NEK1 |
| 5638 | 1554659_at | 5.00E−04 | NEK4 |
| 5170 | 1557172_x_at | 4.99E−04 | NEK8 |
| 2110 | 216115_at | 0.001163 | NF1 |
| 8453 | 217526_at | 1.00E−06 | NFATC2IP |
| 5736 | 210556_at | 1.81E−04 | NFATC3 |
| 123 | 207492_at | 3.13E−04 | NGLY1 |
| 2824 | 1568974_at | 5.55E−05 | NHEG1 |
| 5328 | 219418_at | 3.89E−04 | NHEJ1 /// SLC23A3 |
| 7020 | 227040_at | 6.00E−19 | NHLRC3 |
| 6811 | 232158_x_at | 1.77E−04 | NIPAL1 |
| 2137 | 241395_at | 0.00102 | NIT1 |
| 3620 | 1557737_s_at | 1.35E−05 | NKTR |
| 796 | 234762_x_at | 2.95E−04 | NLN |
| 3465 | 225942_at | 4.50E−04 | NLN |
| 4416 | 221690_s_at | 0.002 | NLRP2 |
| 5115 | 216015_s_at | 0.002 | NLRP3 |
| 5115 | 216016_at | 0.002 | NLRP3 |
| 214 | 215069_at | 4.00E−05 | NMT2 |
| 287 | 238530_at | 0.00105 | NNT |
| 483 | 1559139_at | 8.18E−04 | NOC2L |
| 5170 | 1558738_at | 2.92E−04 | NOL3 |
| 9628 | 229220_x_at | 2.43E−04 | NOM1 |
| 7984 | 242922_at | 4.67E−05 | NOMO3 |
| 1129 | 214123_s_at | 4.03E−04 | NOP14-AS1 |
| 4043 | 1555390_at | 0.004 | NOP9 |
| 4579 | 217584_at | 1.69E−04 | NPC1 |
| 416 | 206285_at | 3.30E−04 | NPHP1 |
| 1043 | 1553389_at | 9.90E−05 | NPHP3 |
| 2824 | 235432_at | 2.25E−04 | NPHP3 |
| 7908 | 204538_x_at | 6.67E−13 | NPIP |
| 7908 | 221992_at | 1.00E−07 | NPIPL2 |
| 5736 | 236860_at | 1.07E−04 | NPY6R |
| 3465 | 1568913_at | 1.77E−04 | NSUN3 |
| 5170 | 222886_at | 4.53E−04 | NSUN3 |
| 5170 | 209155_s_at | 1.39E−04 | NT5C2 |
| 559 | 234737_at | 6.28E−04 | NT5DC3 |
| 8366 | 1569030_s_at | 2.40E−05 | NUB1 |
| 5328 | 234332_at | 7.96E−05 | NUB1 |
| 5328 | 219347_at | 1.81E−04 | NUDT15 |
| 7129 | 232251_at | 0.00105 | NUDT16P1 |
| 2110 | 1554663_a_at | 0.001398 | NUMA1 |
| 5736 | 214675_at | 1.02E−04 | NUP188 |
| 3697 | 219007_at | 5.62E−04 | NUP43 |
| 5891 | 218039_at | 7.00E−07 | NUSAP1 |
| 9051 | 1553755_at | 4.85E−04 | NXNL1 |
| 5222 | 221684_s_at | 5.00E−04 | NYX |
| 7461 | 232644_x_at | 0.00155 | OCIAD1 |
| 5328 | 239748_x_at | 6.49E−05 | OCIAD1 |
| 3468 | 205760_s_at | 0.002 | OGG1 |
| 2110 | 219975_x_at | 7.37E−04 | OLAH |
| 3402 | 229624_at | 4.60E−04 | OPA3 |
| 6358 | 206323_x_at | 3.00E−05 | OPHN1 |
| 2584 | 222290_at | 4.00E−05 | OR2A20P /// OR2A9P |
| 4425 | 1566956_at | 1.60E−06 | OR7E104P |
| 7567 | 228676_at | 4.15E−04 | ORAOV1 |
| 5170 | 205085_at | 2.87E−04 | ORC1 |
| 5328 | 219105_x_at | 1.37E−04 | ORC6 |
| 559 | 1563051_at | 3.20E−05 | OSBP |
| 9397 | 216755_at | 2.05E−04 | OSBPL10 |
| 8431 | 1554503_a_at | 4.46E−04 | OSCAR |
| 1964 | 230032_at | 0.001001 | OSGEPL1 |
| 1043 | 206048_at | 0.001158 | OVOL2 |
| 4012 | 229686_at | 7.00E−05 | P2RY8 |
| 5043 | 1560715_at | 7.94E−05 | P4HA3 |
| 4621 | 1560770_at | 7.12E−04 | PABPC1 |
| 7984 | 235554_x_at | 2.61E−04 | PACRGL |
| 5043 | 211412_at | 2.22E−04 | PADI4 |
| 2824 | 205233_s_at | 6.41E−05 | PAFAH2 |
| 8270 | 201013_s_at | 4.50E−04 | PAICS |
| 1562 | 214664_at | 6.57E−04 | PAICS |
| 1129 | 215374_at | 4.16E−05 | PAPOLA |
| 8355 | 227348_at | 1.00E−04 | PARS2 |
| 5889 | 1563458_at | 6.50E−04 | PARVA |
| 2017 | 235279_at | 3.00E−06 | PARVA |
| 8278 | 244342_at | 2.00E−07 | PATL1 |
| 2168 | 213917_at | 5.00E−05 | PAX8 |
| 6249 | 217049_x_at | 3.71E−04 | PCDH11X /// PCDH11Y |
| 5328 | 223927_at | 1.53E−04 | PCDHB9 |
| 8147 | 210368_at | 6.18E−04 | PCDHGA8 |
| 3465 | 237577_at | 0.002 | PCNP |
| 2824 | 217624_at | 2.56E−04 | PDAP1 |
| 5937 | 231809_x_at | 4.78E−04 | PDCD7 |
| 3676 | 204449_at | 3.77E−04 | PDCL |
| 7992 | 214826_at | 0.001679 | PDE12 |
| 1043 | 206792_x_at | 3.64E−04 | PDE4C |
| 1138 | 204491_at | 0.002 | PDE4D |
| 2824 | 210304_at | 3.93E−04 | PDE6B |
| 9338 | 1552343_s_at | 2.45E−05 | PDE7A |
| 9345 | 1562321_at | 1.05E−05 | PDK4 |
| 1562 | 208233_at | 5.10E−04 | PDPN |
| 5328 | 221898_at | 2.00E−04 | PDPN |
| 1735 | 225075_at | 6.00E−04 | PDRG1 |
| 2824 | 1560014_s_at | 4.62E−05 | PDXDC1 |
| 2824 | 1560013_at | 4.81E−04 | PDXDC1 |
| 5328 | 1566670_at | 6.04E−05 | PDXK |
| 5216 | 223619_x_at | 2.08E−04 | PECR |
| 4907 | 213791_at | 4.77E−05 | PENK |
| 3867 | 1557476_at | 3.00E−06 | PFN4 |
| 4579 | 215179_x_at | 4.52E−04 | PGF |
| 7472 | 221788_at | 0.0025 | PGM3 |
| 3676 | 231812_x_at | 4.36E−04 | PHAX |
| 4579 | 235767_x_at | 5.43E−04 | PHAX |
| 8819 | 209422_at | 0.002002 | PHF20 |
| 8156 | 1558965_at | 5.43E−04 | PHF21A |
| 8303 | 1559705_s_at | 4.49E−05 | PHKA2 |
| 5736 | 202739_s_at | 1.64E−04 | PHKB |
| 5736 | 210919_at | 3.43E−04 | PHLPP1 |
| 5860 | 205325_at | 0.003 | PHYHIP |
| 3465 | 1566111_at | 2.45E−04 | PIEZO1 |
| 1457 | 1555394_at | 0.004 | PIGK |
| 6249 | 1568986_x_at | 6.43E−04 | PIGT |
| 4268 | 235792_x_at | 8.59E−05 | PIK3C2A |
| 4331 | 206370_at | 4.64E−04 | PIK3CG |
| 7472 | 216436_at | 0.0011 | PIK3R4 |
| 7331 | 219788_at | 0.001799 | PILRA |
| 5170 | 221605_s_at | 3.27E−04 | PIPOX |
| 5732 | 1563465_at | 2.70E−04 | PKD1L1 |
| 5170 | 224226_at | 5.89E−04 | PKD2L2 |
| 187 | 204196_x_at | 5.20E−06 | PKNOX1 |
| 378 | 214750_at | 7.85E−04 | PLAC4 |
| 5328 | 234971_x_at | 8.50E−04 | PLCD3 |
| 5328 | 1552476_s_at | 4.18E−04 | PLCD3 |
| 9338 | 1566740_at | 3.74E−04 | PLCE1 |
| 3465 | 224892_at | 6.33E−04 | PLDN |
| 492 | 217677_at | 7.38E−04 | PLEKHA2 |
| 6251 | 1558407_at | 2.35E−05 | PLEKHG2 |
| 559 | 236255_at | 9.13E−05 | PLEKHG4B |
| 8015 | 218290_at | 0.0012 | PLEKHJ1 |
| 5170 | 219857_at | 4.48E−04 | PLEKHS1 |
| 4268 | 215895_x_at | 2.08E−05 | PLIN2 |
| 5328 | 202122_s_at | 8.44E−05 | PLIN3 |
| 345 | 241368_at | 4.80E−04 | PLIN5 |
| 5328 | 215462_at | 3.39E−05 | PLK3 |
| 4973 | 235127_at | 3.00E−06 | PMP2 |
| 8908 | 214756_x_at | 3.60E−04 | PMS2P1 |
| 8908 | 217485_x_at | 3.60E−04 | PMS2P1 |
| 9352 | 210722_at | 9.88E−05 | PNLIPRP1 |
| 796 | 211697_x_at | 2.18E−04 | PNO1 |
| 3465 | 201695_s_at | 8.57E−04 | PNP |
| 2824 | 1553364_at | 2.08E−04 | PNPLA1 |
| 2824 | 220411_x_at | 3.01E−04 | PODNL1 |
| 6774 | 222564_at | 0.003 | POGK |
| 8366 | 215281_x_at | 3.59E−04 | POGZ |
| 8132 | 244575_at | 0.001848 | POLA2 |
| 1562 | 208828_at | 8.20E−04 | POLE3 |
| 1885 | 233852_at | 8.58E−04 | POLH |
| 5170 | 219380_x_at | 3.08E−04 | POLH |
| 796 | 1555317_at | 9.39E−06 | POLK |
| 9628 | 235280_at | 7.12E−05 | POLR1A |
| 123 | 220113_x_at | 5.34E−04 | POLR1B |
| 3465 | 233341_s_at | 5.00E−04 | POLR1B |
| 9628 | 218997_at | 2.62E−04 | POLR1E |
| 8908 | 216242_x_at | 3.60E−04 | POLR2J2 /// POLR2J3 /// POLR2J4 /// UPK3BL |
| 416 | 205096_at | 1.05E−04 | POM121 |
| 4808 | 207109_at | 2.84E−04 | POU2F3 |
| 9365 | 1555322_at | 7.45E−04 | PP2672 |
| 559 | 244689_at | 2.02E−04 | PPARA |
| 4331 | 210771_at | 4.23E−04 | PPARA |
| 5328 | 210636_at | 3.79E−04 | PPARD |
| 2824 | 208411_x_at | 1.38E−04 | PPEF2 |
| 5170 | 203735_x_at | 1.79E−04 | PPFIBP1 |
| 560 | 225073_at | 3.00E−04 | PPHLN1 |
| 5328 | 204185_x_at | 1.58E−04 | PPID |
| 9797 | 236754_at | 0.002 | PPP1R2 |
| 2824 | 1563690_at | 3.23E−05 | PPP4R1 |
| 9345 | 1570210_x_at | 4.76E−04 | PPP6R2 |
| 5328 | 238110_at | 2.22E−05 | PPP6R2 |
| 8430 | 232312_at | 5.00E−04 | PPP6R3 |
| 4331 | 236999_at | 3.50E−04 | PPWD1 |
| 8319 | 1555783_x_at | 4.50E−05 | PQLC2 |
| 8319 | 1555781_at | 4.50E−05 | PQLC2 |
| 5328 | 220714_at | 8.37E−05 | PRDM14 |
| 492 | 215067_x_at | 9.60E−04 | PRDX2 |
| 521 | 200845_s_at | 1.00E−08 | PRDX6 |
| 7249 | 220732_at | 5.00E−04 | PREX2 |
| 9338 | 232811_x_at | 7.36E−05 | PRICKLE1 |
| 4482 | 1561676_at | 5.00E−05 | PRICKLE2-AS3 |
| 4104 | 217349_s_at | 0.003 | PRICKLE3 |
| 9051 | 205628_at | 8.76E−04 | PRIM2 |
| 9397 | 238489_at | 2.49E−04 | PRKAA2 |
| 559 | 204842_x_at | 2.00E−04 | PRKAR2A |
| 1921 | 214080_x_at | 0.005 | PRKCSH |
| 2824 | 1569748_at | 1.39E−04 | PRKCZ |
| 5115 | 231758_at | 5.00E−04 | PRM3 |
| 6843 | 213320_at | 6.00E−04 | PRMT3 |
| 5328 | 222106_at | 1.28E−04 | PRND |
| 1101 | 222965_at | 0.002 | PRO2214 |
| 559 | 230270_at | 3.94E−04 | PRPF38B |
| 347 | 232215_x_at | 2.99E−04 | PRR11 |
| 5328 | 219392_x_at | 1.40E−04 | PRR11 |
| 5736 | 1553761_at | 5.78E−04 | PRR14L |
| 5170 | 1560448_at | 1.94E−04 | PRR7-AS1 |
| 2824 | 207291_at | 1.82E−05 | PRRG4 |
| 5736 | 1556308_at | 2.14E−04 | PRRT3 |
| 6936 | 202458_at | 6.00E−04 | PRSS23 |
| 8354 | 229441_at | 0.003 | PRSS23 |
| 5328 | 222255_at | 5.84E−05 | PRX |
| 796 | 1559206_at | 9.87E−05 | PSEN1 |
| 1340 | 232648_at | 0.00155 | PSMA3 |
| 7700 | 238425_at | 0.001133 | PSMB2 |
| 1047 | 201404_x_at | 1.28E−04 | PSMB2 |
| 5170 | 205194_at | 1.87E−04 | PSPH |
| 2602 | 233254_x_at | 0.001 | PTEN |
| 2824 | 211265_at | 3.55E−04 | PTGER3 |
| 4267 | 1559529_at | 2.38E−04 | PTK2 |
| 2824 | 206482_at | 8.74E−05 | PTK6 |
| 2824 | 1555324_at | 1.47E−04 | PTK7 |
| 5170 | 1554376_s_at | 3.20E−04 | PTPLA |
| 10019 | 243792_x_at | 0.00164 | PTPN13 |
| 3020 | 242321_at | 5.45E−05 | PTPN14 |
| 538 | 244533_at | 5.44E−04 | PTPN14 |
| 796 | 203555_at | 8.64E−04 | PTPN18 |
| 4808 | 232161_x_at | 6.62E−05 | PTPN4 |
| 3508 | 230250_at | 0.005 | PTPRB |
| 559 | 215066_at | 8.14E−05 | PTPRF |
| 2824 | 218984_at | 0.001688 | PUS7 |
| 4331 | 223540_at | 8.61E−05 | PVRL4 |
| 7214 | 1565604_at | 2.00E−07 | PWP2 |
| 559 | 241933_at | 1.24E−04 | QRSL1 |
| 8453 | 233089_at | 1.00E−06 | QRSL1 |
| 5328 | 1560696_x_at | 2.26E−05 | QTRTD1 |
| 5328 | 1560695_at | 2.26E−05 | QTRTD1 |
| 9365 | 1556123_a_at | 0.002 | RAB11B-AS1 |
| 2824 | 231830_x_at | 3.19E−04 | RAB11FIP1 |
| 5170 | 225746_at | 0.001239 | RAB11FIP4 |
| 1043 | 1554800_at | 8.09E−04 | RAB39A |
| 5170 | 1565800_x_at | 1.09E−04 | RAB3IP |
| 5170 | 1565799_at | 1.09E−04 | RAB3IP |
| 492 | 1569396_at | 3.23E−04 | RAB40C |
| 932 | 1558021_at | 6.20E−06 | RABEPK |
| 5170 | 204477_at | 3.16E−04 | RABIF |
| 1407 | 226090_x_at | 6.99E−04 | RABL3 |
| 5736 | 204461_x_at | 2.32E−04 | RAD1 |
| 5117 | 205023_at | 2.08E−05 | RAD51 |
| 5736 | 215162_at | 1.66E−04 | RALGAPA1 |
| 5652 | 234923_at | 0.003 | RALGAPA1 |
| 5328 | 1555452_at | 5.38E−05 | RALGPS1 |
| 2824 | 212706_at | 4.25E−04 | RASA4 /// RASA4B |
| 5328 | 217201_at | 5.75E−05 | RASAL2 |
| 1265 | 220680_at | 0.002 | RAVER2 |
| 2824 | 1552311_a_at | 1.83E−04 | RAX2 |
| 5328 | 205169_at | 2.11E−05 | RBBP5 |
| 6249 | 205296_at | 7.45E−04 | RBL1 |
| 7481 | 200997_at | 0.005 | RBM14-RBM4 /// RBM4 |
| 4579 | 208319_s_at | 7.76E−05 | RBM3 |
| 559 | 227979_at | 1.02E−04 | RBM4 |
| 5968 | 221596_s_at | 2.88E−04 | RBM48 |
| 5328 | 1560322_at | 1.06E−04 | RBMS3 |
| 379 | 231961_at | 2.45E−05 | RBPMS |
| 483 | 207836_s_at | 1.28E−04 | RBPMS |
| 483 | 207837_at | 1.28E−04 | RBPMS |
| 6811 | 217775_s_at | 1.43E−06 | RDH11 |
| 2548 | 216153_x_at | 3.00E−06 | RECK |
| 3509 | 1558116_x_at | 5.00E−05 | RECK |
| 3509 | 1558115_at | 5.00E−05 | RECK |
| 9345 | 203225_s_at | 2.75E−05 | RFK |
| 123 | 1552809_at | 9.05E−04 | RFX4 |
| 9628 | 209638_x_at | 2.93E−04 | RGS12 |
| 6358 | 233164_x_at | 8.12E−04 | RHBDD1 |
| 5328 | 210429_at | 1.02E−05 | RHD |
| 6249 | 240111_at | 1.81E−04 | RHOBTB3 |
| 10019 | 1559582_at | 2.63E−04 | RHOQ |
| 2824 | 227196_at | 1.60E−04 | RHPN2 |
| 6249 | 233811_at | 0.001386 | RIN2 |
| 8303 | 215588_x_at | 7.10E−04 | RIOK3 |
| 8269 | 209941_at | 3.00E−05 | RIPK1 |
| 6084 | 220329_s_at | 1.70E−05 | RMND1 |
| 483 | 207735_at | 7.40E−06 | RNF125 |
| 6548 | 201824_at | 5.00E−04 | RNF14 |
| 8430 | 1556797_at | 0.002 | RNF144A-AS1 |
| 9628 | 211387_x_at | 5.87E−04 | RNGTT |
| 5016 | 1562682_at | 0.002 | RORA |
| 4220 | 1565759_at | 0.0035 | RPL13 |
| 796 | 1563581_at | 4.24E−05 | RPL34-AS1 |
| 9338 | 215208_x_at | 2.44E−04 | RPL35A |
| 492 | 224738_x_at | 5.15E−04 | RPL7L1 |
| 8306 | 217670_at | 0.00115 | RPLP2 |
| 5736 | 1563014_at | 4.27E−04 | RPS15 |
| 9628 | 1566079_at | 5.11E−04 | RPS16P5 |
| 7645 | 211487_x_at | 0.002 | RPS17 /// RPS17L |
| 4064 | 242451_x_at | 3.02E−04 | RPS19 |
| 5328 | 216247_at | 1.38E−04 | RPS20 /// SNORD54 |
| 5736 | 207489_at | 2.90E−04 | RPS2P45 |
| 1129 | 1557981_at | 1.50E−05 | RPS9 |
| 7869 | 1555916_at | 8.63E−04 | RPUSD3 |
| 2824 | 227888_at | 2.20E−04 | RRBP1 |
| 2824 | 222733_x_at | 1.57E−04 | RRP1 |
| 4793 | 1559127_x_at | 1.77E−04 | RRP12 |
| 4793 | 1559126_at | 3.67E−05 | RRP12 |
| 1043 | 242625_at | 2.86E−04 | RSAD2 |
| 5170 | 212019_at | 1.32E−04 | RSL1D1 |
| 4331 | 230093_at | 1.78E−04 | RSPH1 |
| 8763 | 1555272_at | 3.34E−04 | RSPH10B /// RSPH10B2 |
| 1562 | 215618_at | 9.26E−04 | RSU1 |
| 5170 | 230490_x_at | 6.97E−04 | RSU1 |
| 2824 | 238087_at | 1.45E−04 | RTCA |
| 7421 | 229334_at | 6.57E−04 | RUFY3 |
| 2497 | 1559882_at | 3.34E−05 | SAMHD1 |
| 5328 | 235529_x_at | 2.23E−04 | SAMHD1 |
| 5328 | 234987_at | 1.85E−05 | SAMHD1 |
| 9628 | 235964_x_at | 2.13E−04 | SAMHD1 |
| 3465 | 207889_at | 3.39E−04 | SARDH |
| 5526 | 234491_s_at | 1.67E−05 | SAV1 |
| 1047 | 216161_at | 2.20E−04 | SBNO1 |
| 4268 | 232597_x_at | 2.15E−05 | SCAF11 |
| 4579 | 206021_at | 3.53E−05 | SCAND2 |
| 1129 | 232421_at | 4.03E−04 | SCARB1 |
| 8198 | 215754_at | 0.001 | SCARB2 |
| 2110 | 206995_x_at | 9.07E−04 | SCARF1 |
| 6628 | 220232_at | 3.00E−13 | SCD5 |
| 5328 | 222272_x_at | 5.76E−04 | SCIN |
| 2824 | 206147_x_at | 7.40E−05 | SCML2 |
| 6249 | 220791_x_at | 6.08E−04 | SCN11A |
| 2824 | 224029_x_at | 2.53E−04 | SCN11A |
| 796 | 210364_at | 7.86E−06 | SCN2B |
| 1594 | 218681_s_at | 0.00185 | SDF2L1 |
| 63 | 1558919_a_at | 2.27E−04 | SEC231P |
| 4786 | 202375_at | 7.00E−04 | SEC24D |
| 9397 | 205405_at | 2.37E−05 | SEMA5A |
| 1047 | 208671_at | 4.74E−04 | SERINC1 |
| 9345 | 1558727_at | 4.75E−04 | SERP2 |
| 1129 | 209723_at | 6.44E−04 | SERPINB9 |
| 4579 | 1564972_x_at | 5.63E−05 | SETDB2 |
| 4579 | 1564970_at | 5.63E−05 | SETDB2 |
| 7783 | 232487_at | 0.002 | SFT2D1 |
| 5736 | 213936_x_at | 5.14E−04 | SFTPB |
| 6515 | 214354_x_at | 5.18E−05 | SFTPB |
| 7991 | 218392_x_at | 1.21E−04 | SFXN1 |
| 6811 | 220974_x_at | 2.84E−04 | SFXN3 |
| 5328 | 231938_at | 2.52E−04 | SGOL1 |
| 9020 | 217538_at | 3.35E−05 | SGSM2 |
| 5328 | 222169_x_at | 7.38E−05 | SH2D3A |
| 5328 | 217253_at | 5.54E−05 | SH3BP2 |
| 3465 | 205636_at | 1.04E−04 | SH3GL3 |
| 4579 | 1564377_at | 2.56E−04 | SHANK2 |
| 123 | 224139_at | 0.001335 | SHANK2-AS3 |
| 559 | 219493_at | 3.32E−04 | SHCBP1 |
| 4081 | 202980_s_at | 1.00E−04 | SIAH1 |
| 2524 | 1552910_at | 2.63E−04 | SIGLEC11 |
| 2824 | 215856_at | 1.36E−04 | SIGLEC15 |
| 3548 | 208253_at | 3.00E−06 | SIGLEC8 |
| 5328 | 208157_at | 2.83E−05 | SIM2 |
| 10019 | 1558331_at | 7.35E−04 | SIRT2 |
| 2824 | 1569938_at | 1.80E−05 | SIRT5 |
| 5115 | 206634_at | 0.002 | SIX3 |
| 5732 | 204362_at | 0.0015 | SKAP2 |
| 416 | 215889_at | 1.05E−04 | SKIL |
| 1340 | 1562142_at | 3.14E−04 | SKIV2L2 |
| 4579 | 1552497_a_at | 5.58E−05 | SLAMF6 |
| 4579 | 217473_x_at | 6.69E−04 | SLC11A1 |
| 4579 | 210422_x_at | 6.69E−04 | SLC11A1 |
| 9352 | 210047_at | 8.00E−05 | SLC11A2 |
| 2136 | 215274_at | 0.0016 | SLC12A3 |
| 9022 | 211349_at | 0.003 | SLC15A1 |
| 7567 | 223441_at | 7.00E−05 | SLC17A5 |
| 716 | 242578_x_at | 4.00E−04 | SLC22A3 |
| 3465 | 1553265_at | 2.00E−04 | SLC23A3 |
| 9397 | 1568922_at | 1.99E−05 | SLC24A4 |
| 2824 | 211855_s_at | 1.58E−05 | SLC25A14 |
| 9628 | 1569793_at | 2.21E−04 | SLC25A18 |
| 9628 | 220182_at | 1.80E−04 | SLC25A23 |
| 5170 | 206529_x_at | 2.72E−04 | SLC26A4 |
| 5316 | 207249_s_at | 1.14E−04 | SLC28A2 |
| 4405 | 1560062_at | 9.00E−05 | SLC29A2 |
| 4268 | 232167_at | 1.07E−05 | SLC2A11 |
| 9628 | 1558832_at | 4.54E−04 | SLC2A1-AS1 |
| 3212 | 202497_x_at | 3.00E−04 | SLC2A3 |
| 5328 | 220091_at | 6.37E−05 | SLC2A6 |
| 5652 | 238845_at | 6.00E−04 | SLC30A4 |
| 4808 | 220181_x_at | 1.82E−04 | SLC30A5 |
| 4268 | 243643_x_at | 3.00E−06 | SLC30A6 |
| 1043 | 203971_at | 2.49E−04 | SLC31A1 |
| 4331 | 236217_at | 0.002 | SLC31A1 |
| 483 | 204124_at | 1.03E−04 | SLC34A2 |
| 1043 | 220796_x_at | 5.55E−04 | SLC35E1 |
| 18 | 230694_at | 4.00E−08 | SLC35E2B |
| 8394 | 230448_at | 1.00E−06 | SLC38A10 |
| 5170 | 1555433_at | 2.03E−04 | SLC39A14 |
| 7421 | 233123_at | 3.39E−04 | SLC40A1 |
| 7815 | 1552782_at | 1.85E−05 | SLC44A5 |
| 2824 | 219125_s_at | 2.29E−05 | SLC50A1 |
| 984 | 244620_at | 3.00E−06 | SLC8A1-AS1 |
| 796 | 1555142_at | 2.32E−05 | SLC9B1 |
| 9831 | 211481_at | 3.10E−05 | SLCO1A2 |
| 211 | 238430_x_at | 0.001184 | SLFN5 |
| 2136 | 216216_at | 0.002 | SLIT3 |
| 5016 | 210580_x_at | 0.001439 | SLX1A-SULT1A3 /// SLX1B-SULT1A4 /// SULT1A3 /// SULT1A4 |
| 483 | 206565_x_at | 7.43E−04 | SMA4 |
| 9338 | 1569073_x_at | 9.59E−05 | SMARCA4 |
| 6131 | 1556925_at | 0.00125 | SMC3 |
| 8303 | 215623_x_at | 2.00E−04 | SMC4 |
| 6071 | 1553020_at | 3.00E−04 | SMCR5 |
| 5969 | 233946_at | 8.00E−07 | SMU1 |
| 8165 | 222286_at | 1.00E−04 | SNAPC3 |
| 2173 | 224610_at | 7.00E−05 | SNHG1 /// SNORD22 /// SNORD25 /// SNORD26 /// SNORD27 /// |
| | | | SNORD28 /// SNORD29 /// SNORD31 |
| 6251 | 229209_at | 2.16E−04 | SNHG10 |
| 2824 | 1564911_at | 2.07E−04 | SNHG4 |
| 2824 | 232355_at | 2.07E−04 | SNORD114-3 |
| 67 | 226263_at | 0.002026 | SNRNP48 |
| 5170 | 1560741_at | 2.83E−04 | SNRPN /// SNURF |
| 7992 | 222183_x_at | 4.67E−04 | SNW1 |
| 9338 | 205482_x_at | 2.18E−04 | SNX15 |
| 6634 | 234098_at | 6.04E−04 | SOBP |
| 5043 | 215852_x_at | 3.39E−04 | SOGA1 |
| 6675 | 230782_at | 3.00E−06 | SORD |
| 5115 | 211665_s_at | 5.00E−04 | SOS2 |
| 5736 | 235526_at | 5.15E−04 | SOX6 |
| 7848 | 226913_s_at | 1.00E−05 | SOX8 |
| 9338 | 214791_at | 6.65E−05 | SP140L |
| 1752 | 216989_at | 0.003333 | SPAM1 |
| 5170 | 1570130_at | 3.26E−04 | SPATS2 |
| 3592 | 217610_at | 6.26E−04 | SPDYE2 |
| 4793 | 215383_x_at | 8.10E−05 | SPG21 |
| 5170 | 235325_at | 1.19E−04 | SPG7 |
| 6325 | 206318_at | 2.48E−04 | SPINLW1 /// SPINLW1-WFDC6 |
| 6520 | 1569723_a_at | 2.17E−04 | SPIRE2 |
| 5170 | 243594_x_at | 3.13E−04 | SPIRE2 |
| 796 | 206056_x_at | 3.45E−04 | SPN |
| 796 | 206057_x_at | 2.36E−04 | SPN |
| 796 | 216981_x_at | 2.36E−04 | SPN |
| 5328 | 1568964_x_at | 3.65E−04 | SPN |
| 5736 | 1562415_a_at | 4.07E−05 | SPOCD1 |
| 1129 | 210693_at | 1.19E−04 | SPPL2B |
| 8763 | 214925_s_at | 7.50E−05 | SPTAN1 |
| 3588 | 243361_at | 1.00E−04 | SREK1 |
| 6173 | 1554676_at | 0.001275 | SRGN |
| 1885 | 232392_at | 9.64E−04 | SRSF3 |
| 3660 | 242837_at | 0.002 | SRSF4 |
| 6973 | 204963_at | 0.004 | SSPN |
| 2089 | 210242_x_at | 2.14E−04 | ST20 |
| 2089 | 217104_at | 2.14E−04 | ST20 |
| 559 | 208322_s_at | 0.00116 | ST3GAL1 |
| 9338 | 217650_x_at | 1.34E−04 | ST3GAL2 |
| 5270 | 202440_s_at | 5.00E−04 | ST5 |
| 5170 | 232588_at | 2.80E−04 | STAG1 |
| 7501 | 203544_s_at | 0.002 | STAM |
| 9397 | 242569_at | 8.00E−06 | STAM2 |
| 194 | 206868_at | 5.00E−04 | STARD8 |
| 5736 | 1554686_at | 1.34E−04 | STAU2 |
| 9748 | 1556185_a_at | 5.00E−06 | STEAP4 |
| 1961 | 1563496_at | 3.00E−06 | STL |
| 5636 | 201060_x_at | 9.17E−05 | STOM |
| 8960 | 1553202_at | 0.001 | STOX1 |
| 10019 | 1569815_x_at | 9.04E−04 | STRN |
| 10019 | 1569813_at | 9.04E−04 | STRN |
| 5577 | 212111_at | 0.00195 | STX12 |
| 559 | 226662_at | 2.16E−04 | STX17 |
| 7992 | 1555614_at | 3.35E−04 | SUGT1P1 |
| 2045 | 215299_x_at | 0.002333 | SULT1A1 |
| 6008 | 222940_at | 2.00E−04 | SULT1E1 |
| 1043 | 206293_at | 3.84E−04 | SULT2A1 |
| 5328 | 225002_s_at | 5.16E−05 | SUMF2 |
| 5170 | 206487_at | 3.16E−04 | SUN1 |
| 3646 | 1566191_at | 1.62E−04 | SUZ12 |
| 2824 | 217704_x_at | 5.20E−05 | SUZ12P |
| 790 | 232119_at | 1.00E−04 | SYNPO2 |
| 5016 | 232445_at | 0.002575 | SYT9 |
| 5736 | 1559289_at | 3.77E−04 | TADA1 |
| 2985 | 209358_at | 1.00E−06 | TAF11 |
| 4291 | 214690_at | 0.002 | TAF1B |
| 5043 | 1553011_at | 4.63E−04 | TAF1L |
| 2824 | 1556178_x_at | 3.49E−04 | TAF8 |
| 3676 | 1556176_at | 6.77E−04 | TAF8 |
| 4793 | 234697_x_at | 3.59E−04 | TAMM41 |
| 3588 | 216310_at | 2.62E−04 | TAOK1 |
| 1043 | 214413_at | 1.49E−04 | TAT |
| 1043 | 206916_x_at | 1.39E−04 | TAT |
| 6358 | 1569566_at | 1.40E−07 | TBC1D1 |
| 8156 | 202495_at | 2.23E−04 | TBCC |
| 5736 | 206451_at | 1.74E−04 | TBCCD1 |
| 663 | 1570293_at | 7.75E−04 | TBL1X |
| 8306 | 1564683_at | 3.45E−04 | TBL3 |
| 8015 | 207662_at | 5.44E−04 | TBX1 |
| 1043 | 215122_at | 5.01E−04 | TBX6 |
| 5873 | 207554_x_at | 6.87E−05 | TBXA2R |
| 2089 | 211590_x_at | 9.17E−06 | TBXA2R |
| 8324 | 1566207_at | 8.90E−04 | TCEA1 |
| 483 | 1566208_at | 2.33E−04 | TCEA1 |
| 3548 | 1563863_x_at | 3.00E−06 | TCEANC |
| 3548 | 1563862_at | 3.00E−06 | TCEANC |
| 5170 | 1562470_at | 0.001288 | TCEANC2 |
| 5328 | 205255_x_at | 1.38E−04 | TCF7 |
| 5328 | 220826_at | 5.61E−05 | TCP10L |
| 5937 | 206438_x_at | 5.68E−04 | TCTN2 |
| 3620 | 1569392_at | 2.32E−04 | TECR |
| 4482 | 241961_at | 3.00E−08 | TECRL |
| 5170 | 215673_at | 2.73E−04 | TEF |
| 185 | 219724_s_at | 1.52E−04 | TESPA1 |
| 324 | 1566606_a_at | 5.15E−05 | TEX9 |
| 5016 | 1566932_x_at | 0.002033 | TFB2M |
| 5115 | 207385_at | 1.00E−04 | TFDP3 |
| 3592 | 215863_at | 4.93E−04 | TFR2 |
| 6366 | 203084_at | 7.00E−07 | TGFB1 |
| 9642 | 1566901_at | 2.00E−05 | TGIF1 |
| 2824 | 1554608_at | 2.78E−04 | TGOLN2 |
| 7992 | 219231_at | 7.59E−04 | TGS1 |
| 1407 | 1566888_at | 6.80E−04 | THADA |
| 5796 | 244190_at | 0.003 | THAP5 |
| 7331 | 235218_x_at | 6.38E−04 | THAP6 |
| 2824 | 1562490_at | 1.57E−04 | THEM5 |
| 9475 | 242377_x_at | 3.29E−04 | THUMPD3 |
| 8010 | 215455_at | 5.27E−04 | TIMELESS |
| 5170 | 215168_at | 9.76E−04 | TIMM17A |
| 5016 | 219058_x_at | 4.93E−04 | TINAGL1 |
| 3635 | 239796_x_at | 0.002 | TIRAP |
| 7964 | 1557275_a_at | 3.03E−04 | TLCD2 |
| 2824 | 241642_x_at | 1.62E−04 | TLK1 |
| 2824 | 241643_at | 2.10E−05 | TLK1 |
| 5170 | 238168_at | 5.99E−05 | TM4SF1 |
| 7313 | 217974_at | 2.18E−04 | TM7SF3 |
| 2113 | 1563222_at | 4.46E−04 | TMBIM4 |
| 4808 | 219206_x_at | 5.61E−05 | TMBIM4 |
| 2985 | 242644_at | 1.00E−06 | TMC8 |
| 8943 | 208715_at | 6.00E−05 | TMCO1 |
| 4793 | 233399_x_at | 3.11E−05 | TMED10P1 /// ZNF252 |
| 9573 | 1558053_s_at | 5.23E−04 | TMED4 |
| 2582 | 239283_at | 2.00E−04 | TMED5 |
| 5016 | 1552302_at | 0.0016 | TMEM106A |
| 2274 | 1558712_at | 1.60E−04 | TMEM134 |
| 9628 | 219589_s_at | 4.83E−05 | TMEM143 |
| 4579 | 231923_at | 8.86E−04 | TMEM150C |
| 5937 | 222267_at | 1.68E−04 | TMEM209 |
| 1428 | 239593_at | 8.05E−04 | TMEM213 |
| 2497 | 220934_s_at | 0.0011 | TMEM223 |
| 6249 | 244495_x_at | 9.43E−04 | TMEM241 |
| 5170 | 224493_x_at | 5.97E−04 | TMEM241 |
| 2045 | 219503_s_at | 1.00E−05 | TMEM40 |
| 5328 | 235037_at | 5.73E−05 | TMEM41A |
| 9396 | 231696_x_at | 0.002 | TMEM50B |
| 2824 | 222907_x_at | 1.24E−04 | TMEM50B |
| 6882 | 1552765_x_at | 7.00E−05 | TMEM67 |
| 6882 | 1552763_at | 7.00E−05 | TMEM67 |
| 2650 | 1569377_at | 3.00E−05 | TMEM67 |
| 9338 | 226483_at | 5.54E−05 | TMEM68 |
| 524 | 223335_at | 3.37E−04 | TMEM69 |
| 9475 | 223771_at | 7.70E−04 | TMEM87A |
| 5170 | 244716_x_at | 3.26E−04 | TMIGD2 |
| 6776 | 221032_s_at | 0.003 | TMPRSS5 |
| 559 | 1555707_at | 6.74E−04 | TNAP |
| 2824 | 1552648_a_at | 9.78E−06 | TNFRSF10A |
| 9628 | 231775_at | 1.84E−04 | TNFRSF10A |
| 5731 | 203508_at | 0.002 | TNFRSF1B |
| 4268 | 207536_s_at | 2.76E−04 | TNFRSF9 |
| 3348 | 214329_x_at | 3.00E−06 | TNFSF10 |
| 10051 | 233935_at | 1.00E−04 | TNFSF14 |
| 5328 | 207907_at | 7.46E−05 | TNFSF14 |
| 4268 | 221085_at | 1.28E−04 | TNFSF15 |
| 9397 | 220655_at | 2.89E−04 | TNIP3 |
| 9338 | 216439_at | 1.43E−04 | TNK2 |
| 1043 | 215844_at | 2.77E−05 | TNPO2 |
| 492 | 222265_at | 7.67E−04 | TNS4 |
| 8426 | 1566833_x_at | 0.0015 | TOP1P2 |
| 8426 | 1566832_at | 0.0015 | TOP1P2 |
| 9365 | 237469_at | 0.001436 | TOP2A |
| 9338 | 1554849_at | 1.12E−04 | TOR1A |
| 5328 | 219620_x_at | 7.52E−05 | TOR4A |
| 5328 | 233589_x_at | 9.71E−05 | TOR4A |
| 5618 | 201746_at | 7.29E−04 | TP53 |
| 5170 | 220403_s_at | 2.04E−04 | TP53AIP1 |
| 1177 | 235192_at | 0.00251 | TP53RK |
| 8766 | 1569502_s_at | 8.81E−05 | TP73-AS1 |
| 9345 | 214601_at | 1.23E−04 | TPH1 |
| 6067 | 222976_s_at | 0.002 | TPM3 |
| 5732 | 203672_x_at | 1.35E−04 | TPMT |
| 492 | 1569856_at | 3.20E−04 | TPP2 |
| 2824 | 1562566_at | 0.001012 | TRAF3IP2-AS1 |
| 5328 | 243553_x_at | 1.19E−04 | TRAF3IP2-AS1 |
| 4936 | 215269_at | 0.003 | TRAPPC10 |
| 10065 | 213193_x_at | 0.002 | TRBC1 |
| 492 | 203148_s_at | 8.96E−04 | TRIM14 |
| 9628 | 204341_at | 1.66E−04 | TRIM16 |
| 5328 | 214815_at | 5.74E−05 | TRIM33 |
| 1043 | 203568_s_at | 2.18E−04 | TRIM38 |
| 3465 | 235084_x_at | 3.67E−04 | TRIM38 |
| 6358 | 224159_x_at | 1.20E−07 | TRIM4 |
| 796 | 210705_s_at | 3.19E−05 | TRIM5 |
| 264 | 231876_at | 0.001075 | TRIM56 |
| 9628 | 235081_x_at | 7.42E−04 | TRIM65 |
| 6844 | 1554182_at | 2.00E−05 | TRIM73 /// TRIM74 |
| 2824 | 210760_x_at | 1.89E−04 | TRIP11 |
| 5873 | 240166_x_at | 2.34E−05 | TRMT10B |
| 1562 | 235097_at | 9.25E−04 | TRMT44 |
| 6520 | 223109_at | 4.00E−06 | TRUB2 |
| 7331 | 244391_at | 7.93E−05 | TSEN2 |
| 5732 | 203227_s_at | 2.40E−04 | TSPAN31 |
| 9707 | 209109_s_at | 3.00E−06 | TSPAN6 |
| 5328 | 218155_x_at | 1.13E−04 | TSR1 |
| 2824 | 1557073_s_at | 3.07E−04 | TTBK2 |
| 416 | 215849_x_at | 2.79E−04 | TTC18 |
| 10019 | 235651_at | 9.12E−04 | TTC22 |
| 2395 | 244189_at | 0.003 | TTC28-AS1 |
| 2824 | 216768_x_at | 9.69E−05 | TTC38 |
| 3588 | 1555307_at | 2.33E−06 | TTF2 |
| 3465 | 208099_x_at | 6.87E−04 | TTLL5 |
| 5316 | 210389_x_at | 1.63E−05 | TUBD1 |
| 5016 | 227967_at | 0.002314 | TUBGCP5 |
| 9365 | 227873_at | 0.00275 | TXNDC15 |
| 416 | 1561080_at | 1.50E−04 | TXNRD1 |
| 7567 | 217497_at | 3.00E−04 | TYMP |
| 6698 | 241825_at | 5.08E−05 | TYW5 |
| 5328 | 231904_at | 3.40E−04 | U2AF1 |
| 5043 | 236715_x_at | 2.75E−04 | UACA |
| 3620 | 229587_at | 1.78E−04 | UBA2 |
| 3465 | 228353_x_at | 1.39E−04 | UBASH3B |
| 3402 | 202335_s_at | 0.001682 | UBE2B |
| 4317 | 238958_at | 0.003333 | UBE2E1 |
| 2824 | 233360_at | 4.05E−04 | UBE2I |
| 5043 | 211008_s_at | 1.44E−04 | UBE2I |
| 9110 | 225209_s_at | 0.004 | UBE2J2 |
| 4808 | 222252_x_at | 2.80E−04 | UBQLN4 |
| 2824 | 215636_at | 3.18E−04 | UBR4 |
| 2824 | 235327_x_at | 6.07E−05 | UBXN2A |
| 5016 | 218050_at | 0.001174 | UFM1 |
| 7649 | 216687_x_at | 4.32E−05 | UGT2B15 |
| 8791 | 207392_x_at | 7.00E−06 | UGT2B15 |
| 5170 | 1568789_at | 0.001391 | UHRF1BP1 |
| 3993 | 221323_at | 1.02E−04 | ULBP1 |
| 5328 | 202707_at | 1.03E−04 | UMPS |
| 5170 | 214817_at | 5.91E−04 | UNC13A |
| 5328 | 207499_x_at | 4.60E−04 | UNC45A |
| 7567 | 221064_s_at | 1.39E−04 | UNKL |
| 2824 | 210065_s_at | 7.07E−05 | UPK1B |
| 4268 | 223613_at | 1.00E−04 | UQCR11 |
| 5328 | 201671_x_at | 8.21E−05 | USP14 |
| 5328 | 216957_at | 1.04E−04 | USP22 |
| 6811 | 230623_x_at | 0.0012 | USP28 |
| 9628 | 207365_x_at | 5.88E−04 | USP34 |
| 7752 | 232621_at | 0.001128 | USP48 |
| 4331 | 216775_at | 9.30E−05 | USP53 |
| 4579 | 208067_x_at | 2.54E−04 | UTY |
| 5043 | 207263_x_at | 1.63E−04 | VEZT |
| 5170 | 1554388_at | 5.18E−04 | VPS29 |
| 1732 | 204590_x_at | 4.89E−04 | VPS33A |
| 5170 | 223845_at | 5.75E−04 | VSIG10 |
| 559 | 231770_x_at | 6.70E−04 | WDPCP |
| 7645 | 241919_x_at | 0.00113 | WDR31 |
| 5737 | 238677_at | 6.73E−04 | WDR36 |
| 5316 | 233242_at | 0.00325 | WDR73 |
| 492 | 205519_at | 3.12E−04 | WDR76 |
| 3796 | 238650_x_at | 3.00E−06 | WDR89 |
| 5736 | 1560662_s_at | 1.80E−04 | WHAMMP2 /// WHAMMP3 |
| 5170 | 224185_at | 3.93E−04 | WRAP53 |
| 941 | 241626_at | 1.00E−05 | WTAP |
| 5736 | 241950_at | 3.63E−04 | WWC1 |
| 285 | 228617_at | 4.00E−05 | XAF1 |
| 9658 | 206133_at | 6.00E−04 | XAF1 |
| 9365 | 242021_at | 0.0028 | XBP1 |
| 5328 | 220020_at | 2.65E−04 | XPNPEP3 |
| 4268 | 226891_at | 2.15E−05 | XXYLT1 |
| 8699 | 1570528_at | 1.89E−04 | XYLT2 |
| 10019 | 210917_at | 3.50E−04 | YES1 |
| 9345 | 1554553_s_at | 7.64E−06 | YIF1B |
| 6071 | 223519_at | 1.00E−05 | ZAK |
| 4268 | 1555259_at | 0.001302 | ZAK |
| 5328 | 208087_s_at | 1.45E−05 | ZBP1 |
| 10019 | 1557036_at | 4.11E−04 | ZBTB1 |
| 2824 | 220391_at | 2.94E−04 | ZBTB3 |
| 9224 | 225845_at | 6.00E−04 | ZBTB44 |
| 5731 | 216844_at | 8.35E−04 | ZC3H7B |
| 9381 | 206169_x_at | 2.00E−06 | ZC3H7B |
| 1697 | 225634_at | 0.002 | ZC3HAV1 |
| 2824 | 220104_at | 4.31E−05 | ZC3HAV1 |
| 5170 | 1553781_at | 5.52E−04 | ZC3HAV1L |
| 2824 | 232911_at | 1.27E−04 | ZFP14 |
| 1732 | 207090_x_at | 4.57E−05 | ZFP30 |
| 6386 | 243161_x_at | 0.002 | ZFP42 |
| 345 | 1554777_at | 3.33E−04 | ZFP42 |
| 9352 | 235176_at | 3.50E−04 | ZFP82 |
| 8849 | 232774_x_at | 2.10E−05 | ZIK1 |
| 3592 | 1553022_at | 9.34E−05 | ZIM3 |
| 2045 | 1562305_x_at | 2.34E−04 | ZKSCAN3 |
| 8847 | 216350_s_at | 1.00E−04 | ZNF10 |
| 2824 | 1552947_x_at | 3.22E−04 | ZNF114 |
| 2824 | 1552946_at | 3.22E−04 | ZNF114 |
| 6358 | 234394_at | 4.00E−08 | ZNF124 |
| 4579 | 219854_at | 3.92E−04 | ZNF14 |
| 2396 | 235580_at | 0.001 | ZNF141 |
| 8850 | 216677_at | 4.00E−05 | ZNF154 |
| 5937 | 214715_x_at | 1.45E−04 | ZNF160 |
| 2594 | 1567032_s_at | 4.00E−06 | ZNF160 |
| 2594 | 1567031_at | 4.00E−06 | ZNF160 |
| 8179 | 206683_at | 4.00E−06 | ZNF165 |
| 8614 | 207417_s_at | 5.01E−06 | ZNF177 /// ZNF559-ZNF177 |
| 8017 | 234953_x_at | 1.00E−05 | ZNF19 |
| 5736 | 231848_x_at | 1.33E−04 | ZNF207 |
| 3609 | 238772_at | 3.01E−04 | ZNF207 |
| 9628 | 239937_at | 1.45E−04 | ZNF207 |
| 4579 | 1555510_at | 9.97E−05 | ZNF215 |
| 8270 | 220847_x_at | 6.45E−04 | ZNF221 |
| 8812 | 206175_x_at | 1.00E−06 | ZNF222 |
| 8812 | 220019_s_at | 1.00E−06 | ZNF224 |
| 8812 | 233461_x_at | 1.00E−06 | ZNF226 |
| 8845 | 217403_s_at | 5.05E−06 | ZNF227 |
| 3102 | 219123_at | 4.00E−06 | ZNF232 |
| 9475 | 210595_at | 0.001099 | ZNF235 |
| 2594 | 203247_s_at | 6.00E−04 | ZNF24 |
| 2824 | 1569557_at | 1.75E−04 | ZNF248 |
| 7214 | 206900_x_at | 7.27E−04 | ZNF253 |
| 8849 | 223714_at | 2.67E−06 | ZNF256 |
| 1043 | 216710_x_at | 2.55E−04 | ZNF287 |
| 8614 | 1567856_x_at | 0.003 | ZNF29P |
| 8614 | 1567855_at | 0.003 | ZNF29P |
| 2594 | 244289_at | 6.00E−04 | ZNF300P1 |
| 2594 | 236551_at | 5.00E−05 | ZNF311 |
| 2594 | 236550_s_at | 5.00E−05 | ZNF311 |
| 9345 | 1558888_x_at | 2.76E−05 | ZNF321P /// ZNF816 /// ZNF816-ZNF321P |
| 3677 | 1558887_at | 4.00E−07 | ZNF321P /// ZNF816 /// ZNF816-ZNF321P |
| 492 | 219765_at | 6.50E−04 | ZNF329 |
| 3102 | 219228_at | 0.003 | ZNF331 |
| 6493 | 1552375_at | 6.00E−05 | ZNF333 |
| 173 | 220022_at | 0.00102 | ZNF334 |
| 7992 | 232873_at | 0.001588 | ZNF33A |
| 492 | 1558586_at | 1.82E−04 | ZNF33B |
| 2262 | 240449_at | 0.003 | ZNF341 |
| 663 | 242208_at | 4.02E−05 | ZNF37BP |
| 8156 | 1554985_at | 1.01E−04 | ZNF396 |
| 1659 | 219826_at | 0.003 | ZNF419 |
| 5736 | 222136_x_at | 2.50E−04 | ZNF43 |
| 5328 | 206829_x_at | 1.46E−05 | ZNF430 |
| 4878 | 233712_at | 5.00E−04 | ZNF44 |
| 5328 | 215359_x_at | 6.45E−04 | ZNF44 |
| 483 | 215892_at | 2.53E−04 | ZNF440 |
| 8614 | 208081_s_at | 0.003 | ZNF442 |
| 5937 | 233992_x_at | 1.56E−04 | ZNF445 |
| 8813 | 207304_at | 5.00E−05 | ZNF45 |
| 6249 | 233175_at | 0.001279 | ZNF460 |
| 1047 | 232391_at | 7.30E−04 | ZNF461 |
| 8614 | 211923_s_at | 7.00E−06 | ZNF471 |
| 8850 | 213124_at | 1.00E−05 | ZNF473 |
| 8614 | 1555368_x_at | 0.001 | ZNF479 |
| 8614 | 1555367_at | 0.001 | ZNF479 |
| 1562 | 1552427_at | 6.28E−04 | ZNF485 |
| 2824 | 1553901_x_at | 4.50E−04 | ZNF486 |
| 5736 | 231988_x_at | 1.79E−04 | ZNF490 |
| 7649 | 235604_x_at | 1.00E−05 | ZNF493 |
| 8311 | 211064_at | 8.71E−05 | ZNF493 |
| 3102 | 225333_at | 0.003 | ZNF496 |
| 9628 | 225335_at | 4.57E−04 | ZNF496 |
| 5328 | 1562386_s_at | 1.46E−05 | ZNF501 |
| 5170 | 221626_at | 2.49E−04 | ZNF506 |
| 1444 | 203604_at | 3.53E−04 | ZNF516 |
| 8766 | 215019_x_at | 2.00E−04 | ZNF528 |
| 8890 | 235121_at | 1.00E−12 | ZNF542 |
| 10019 | 218735_s_at | 8.92E−04 | ZNF544 |
| 1659 | 1558622_a_at | 5.00E−06 | ZNF548 |
| 3102 | 215315_at | 0.001515 | ZNF549 |
| 8849 | 242992_at | 3.50E−06 | ZNF551 |
| 5736 | 219741_x_at | 5.45E−04 | ZNF552 |
| 8614 | 1553286_at | 2.00E−05 | ZNF555 |
| 8708 | 220444_at | 8.00E−17 | ZNF557 |
| 447 | 219163_at | 1.50E−05 | ZNF562 |
| 2824 | 1552770_s_at | 5.24E−04 | ZNF563 |
| 8461 | 1564356_at | 4.88E−04 | ZNF568 |
| 8614 | 1568900_a_at | 3.50E−05 | ZNF568 |
| 8461 | 1552562_at | 0.001517 | ZNF570 |
| 7250 | 1558253_x_at | 2.50E−05 | ZNF587 /// ZNF587B |
| 7250 | 1558251_a_at | 2.50E−05 | ZNF587 /// ZNF587B |
| 5931 | 221963_x_at | 2.00E−07 | ZNF587B |
| 8699 | 1569108_a_at | 0.001362 | ZNF589 |
| 8847 | 242463_x_at | 2.00E−10 | ZNF600 |
| 2824 | 1559849_at | 1.25E−04 | ZNF605 |
| 5328 | 232303_at | 1.01E−04 | ZNF608 |
| 8461 | 235953_at | 6.50E−06 | ZNF610 |
| 6251 | 1559059_s_at | 1.67E−04 | ZNF611 |
| 2824 | 208137_x_at | 2.13E−04 | ZNF611 |
| 6844 | 210599_at | 2.00E−05 | ZNF614 |
| 5170 | 1558743_at | 3.32E−04 | ZNF620 |
| 3592 | 206188_at | 4.24E−05 | ZNF623 |
| 3414 | 1552769_at | 3.00E−06 | ZNF625 |
| 2824 | 1559616_x_at | 4.64E−04 | ZNF626 |
| 4579 | 239243_at | 3.81E−06 | ZNF638 |
| 8763 | 218413_s_at | 3.03E−04 | ZNF639 |
| 8846 | 223616_at | 8.00E−04 | ZNF649 |
| 5328 | 220760_x_at | 3.63E−05 | ZNF665 |
| 4793 | 220215_at | 2.92E−05 | ZNF669 |
| 173 | 208273_at | 3.00E−06 | ZNF670 /// ZNF670-ZNF695 /// ZNF695 |
| 8461 | 1554465_s_at | 0.002 | ZNF673 /// ZNF674 |
| 8303 | 215309_at | 0.002 | ZNF674 |
| 8813 | 217547_x_at | 2.00E−04 | ZNF675 |
| 5043 | 234920_at | 2.62E−04 | ZNF7 |
| 1667 | 220242_x_at | 4.00E−05 | ZNF701 |
| 10009 | 206557_at | 5.00E−04 | ZNF702P |
| 8195 | 239482_x_at | 0.002667 | ZNF708 |
| 8851 | 233754_x_at | 0.002 | ZNF71 |
| 7331 | 215978_x_at | 9.45E−04 | ZNF721 |
| 8461 | 1559275_x_at | 4.42E−04 | ZNF732 |
| 8461 | 1559274_at | 4.42E−04 | ZNF732 |
| 559 | 205881_at | 7.77E−04 | ZNF74 |
| 6251 | 206180_x_at | 1.74E−04 | ZNF747 |
| 8319 | 242633_x_at | 2.96E−04 | ZNF75A |
| 416 | 1558755_x_at | 3.81E−04 | ZNF763 |
| 416 | 1558754_at | 3.81E−04 | ZNF763 |
| 5328 | 219782_s_at | 1.44E−04 | ZNF771 |
| 8852 | 230517_at | 0.00125 | ZNF775 |
| 173 | 1559789_a_at | 1.00E−05 | ZNF781 |
| 8162 | 1554770_x_at | 1.00E−05 | ZNF785 |
| 1885 | 239083_at | 0.001055 | ZNF786 |
| 3102 | 216486_x_at | 0.003 | ZNF79 |
| 3102 | 216482_x_at | 0.003 | ZNF79 |
| 5328 | 1553704_x_at | 4.26E−04 | ZNF791 |
| 5328 | 1553703_at | 4.26E−04 | ZNF791 |
| 2824 | 1554476_x_at | 1.72E−04 | ZNF808 |
| 3102 | 215901_at | 0.001033 | ZNF81 |
| 9628 | 1561038_at | 1.03E−04 | ZNF81 |
| 10019 | 217541_x_at | 1.16E−04 | ZNF816 /// ZNF816-ZNF321P |
| 5115 | 226315_at | 5.00E−04 | ZNF830 |
| 2824 | 215826_x_at | 2.06E−04 | ZNF835 |
| 5618 | 1569076_a_at | 0.0025 | ZNF836 |
| 8851 | 241277_x_at | 3.00E−06 | ZNF837 |
| 542 | 1555078_at | 2.00E−07 | ZNF843 |
| 5043 | 1564362_x_at | 7.39E−05 | ZNF843 |
| 8717 | 1569157_s_at | 0.003 | ZNF846 |
| 9352 | 1564331_at | 2.95E−05 | ZNF846 |
| 2594 | 1564662_at | 6.00E−04 | ZNF852 |
| 345 | 235913_at | 3.28E−05 | ZNF880 |
| 6249 | 1569277_at | 0.001012 | ZNF91 |
| 8614 | 206059_at | 0.001 | ZNF91 |
| 2594 | 215758_x_at | 5.00E−05 | ZNF93 |
| 3609 | 215985_at | 1.50E−04 | ZNRD1-AS1 |
| 3857 | 224124_at | 0.001 | ZRANB3 |
| 8845 | 219904_at | 7.00E−04 | ZSCAN5A |
| 1129 | 235448_at | 4.63E−06 | ZXDC |

^{A}shows the SEQ ID NO;
^{B}affymetrix probe ID that harbors significant identity with the repeats from (A);
^{C}shows the significance of the identity;
^{D}shows the transcript that the affymetrix probe detects

[0065] For the probes presented in Table 6 and 7 a large amount of data is available at http://www.ncbi.nlm.nih.gov/pubmed/geoprofiles, revealing their roles in disease (See List 1 below). Further, the site provides information on gene regulation upon exposure to (a)biotic compounds or medicine (See List 2 below). Unfortunately, from this data it remains unclear whether the effect is obtained through the human CRISPRs being switched ON/OFF upon exposure to (a)biotic compounds or specific pharmaceutical compounds. In order to obtain more information on the mechanism of the observed effects, the exact positions on the Hg19 genome from which the Human Genome U133 Plus 2.0 Array probe sequences were obtained that were used for the above described BLAST analysis were available. Using the Galaxy software package for interval analysis and the exact positions on the Hg19 genome for the human CRISPRs we were able to identify twenty two human CRISPRs that exactly matched the Human Genome U133 Plus 2.0 Array probes. In FIG. 7 expression examples are provided of four probes that were genome position matched to a human CRISPR and resided in an intergenic region. Seventy-four occasions in total were obtained for these four probes demonstrating that a human CRISPR is more active or less active upon (a)biotic or medicine exposure compared to the corresponding control(s) (FIG. 7).

[0066] List 1) shows in a repetitive manner in fasta format the CRISPR SEQ ID NO, the Affymetrix probe ID that harbored a significant identity with the concatenated CRISPR SEQ ID followed by a list of diseases that are linked to the Affymetrix probes.

[0067] List 2) shows in a repetitive manner in fasta format the CRISPR SEQ ID NO, the Affymetrix probe ID that harbored a significant E-value with the repeat of the connected CRISPR SEQ ID to this probe after BLAST analyses followed by a list of (combination of) drugs that have significant effect on the transcript(s) that this Affymetrix probe recognizes.

[0068] List 3) is connected to Table 4 and shows in a repetitive number for each row in the table (row no. is indicated) and shows the genes involved in the disease targets specified in Table 4.

List 1

>5927 1562661 at
(A)biotic stress effect on eukaryotic cells, Pancreatic ductal adenocarcinoma, Streptococcus
oneumoniae infection, Tendinopathy, Medicine resistance cancer cells, Staphylococcus aureus
infection, Prostate cancer, Erythroid differentiation, Pancreatic cancer, Adenoid cystic carcinoma,
Systemic lupus erythematosus, Metaphase II stage oocytes maturation, Pediatric immune
thrombocytopenia
>4064 239410 at
(A)biotic stress effect on eukaryotic cells, Erythroid differentiation, Melanoma progression,
Embryonic development, Breast cancer, Influenza virus infection, Endometrium and menstrual cycle,
Systemic lupus erythematosus, Cystic fibrosis, Francisella tularensis infections, Autosomal dominant
monocytopenia, Polycystic ovary syndrome, Obesity, Papillary thyroid cancer, Newly diagnosed and
chronic pediatric immune chrombocytopenia, Inflammatory dilated cardiomyopathy, Medicine resistance
cancer cells, Teratozoospermia, Muscle function and aging, Male Fetal and adult reticulocytes
>7250 210230 at
(A)biotic stress effect on eukaryotic cells, Essential thrombocythemia, Pituitary adenoma subtypes,
Lassa tever, Multiple sclerosis, Hutchinson-Giltord progeria syndrome, Tuberculosis, Tibial muscular
dystrophy, Endometriosis, Sindbis virus infection, Essential thrombocythemia, Prostate cancer,
Embryonic development, Crohns disease, Small cell lung cancers, Sjögren's syndrome, Alzheimer's
disease, Colon cancer, Rheumatoid arthritis, Toxoplasma gondii infecticn, Non-melanoma skin cancer,
Heart failure, Cystic fibrosis, Prostate cancer, Brain cancer, Pediatric glioblastoma brain tumors,
Francisella tularensis infections, Lethal congenital contracture syndrome, Streptococcus gordonii
infection, T-cell acute lymphoblastic leukemia, Porphyromonas gingivalis infection, Autosomal
dominant monocytopenia, Metaphase II stage oocytes maturation, Acute myeloid leukemia, Muscle
function and aging, Familial combined hyperlipidemia, Breast cancer, House dust mite allergy,
Diamond-Blackfan anaemia, Pulmonary sarcoidosis, Medicine resistance cancer cells, COPD, Sex
specific transcription in hypothalamus
>9629 234590 x at
(A)biotic stress effect on eukaryotic cells, Eutchinson-Gilford progeria syndrome, High-grade
gliomas, Idiopathic pulmonary fibrosis, AIDS-related lymphomas, Multiple sclerosis, Systemic juvenile
idiopathic arthritis, Cerebral aging and Alzheimer's disease, Embryonic development, Burkitt lymphoma
subtypes, Multiple sclerosis, Duchenne Muscular, Dystrophy, Influenza virus infection, Prostate
cancer, Familial hypercholesterolemia, Teratozoospermia, Optineurin depletion, Aldosterone-producing
adeonoma, Dystocic myometrium, Pancreatic cancer, Anaplasma phagocytophilum infection, Systemic lupus
erythematosus, Fetal and adult reticulocytes, Medicine resistance cancer cells
>4599 238016 s at
(A)biotic stress effect on eukaryotic cells Medicine resistance cancer cells, Pompe disease,
Polycystic ovary syndrome, Obesity, Teratozoospermia, ISCU myopathy, Schizophrenia, Colorectal
cancer, Endometriosis, Metaphase II stage oocytes maturation, Optineurin depletion, Vulvar
intraepithelial neoplasia, Pancreatic Tumor Breast cancer, Pediatric glioblastoma brain tumors,
Cystic fibrosis, Heart failure, Kaposi's sarcoma, Sjögren's syndrome, Duchenne, Muscular Dystrophy
response to oxandrolone, Prechondrocyte differentiation, Erythroid differentiation, HIV-associated
neurocognitive disorders, Prostate cancer, Psoriasis, Rhinovirus infection, Plasmodium infection,
Systemic juvenile idiopathic arthritis and non-systemic JIA subtypes, Coronary artery disease,
Multiple sclerosis, Medulloblastomas, Alzheimer's disease
>6399 232273 at
(A)biotic stress effect on eukaryotic cells, Notch-on/off effects on T-lymphoblastic leukemia cells,
Atopic dermatitis, Nodular lymphocyte-predominant, Hodgkin lymphoma, Glioblastoma, Psoriasis, HIV-
associated neurocognitive disorders, Endometrium and menstrual cycle, Staphylococcus superantigen
exposure, Inflammatory bowel disease, Duchenne, Muscular Dystrophy, Sjögren's syndrome, HPV16
infection, Prostate cancer, Placentae development, Chromophobe renal cell carcinoma, ISCU myopathy,
Pulmonary sarcoidosis, Inflammatory dilated cardiomyopathy, Colorectal cancer, Alcoholic hepatitis,
Chronic B-lymphocytic leukemia, Metachronous liver metastases, Medicine resistance cancer cells,
Chlamydia pneumonia infection, Metaphase II stage oocytes maturation, Muscle function and aging
>8195 230580 at
(A)biotic stress effect on eukaryotic cells, Obesity, Asthma, Stage I endometrial cancer, Age and
skeletal muscle types, Prostate cancer, Ovarian endometriosis, Hutchinson-Gilford progeria syndrome,
Polycystic ovary syndrome, Plasmodium infection, Respiratory syncytial virus infection,
Cryptosporidium infection, Erythroid differentiation, Embryonic development, Duchenne, Muscular
Dystrophy Influenza virus infection, Inflammatory bowel disease, Cystic fibrosis, HPV16 infection,
Francisella tularensis infection, Ductal carcinoma in situ, Pancreatic cancer, Multiple sclerosis,
Muscle function and aging - female, Asthma,
Fetal and adult reticulocytes, Medicine resistance cancer cells
>2750 1569527 at
Alcoholic hepatitis, Hereditary gingival fibromatosis, Rotavirus infection, AIDS-related lymphomas,
Hepatitis C, Virus infection, Ulcerative colitis, Williams-Beuren Syndrome, Nodular Lymphocyte-
predominant, Hodgkin lymphoma, Tibial muscular dystrophy, HBV-associated, ALF, Colorectal cancer
primary or metastatic lesions, Erythroid differentiation, HIV-associated neurocognitive disorders,
Multiple sclerosis, Embryonic development, Multistep pancreatic carcinogenesis, Polycystic ovary
syndrome, Sjögren's syndrome, Obesity, Pulmonary sarcoidosis, Multiple sclerosis, Endometriosis,
Chronic B-lymphocytic leukemia, Vulvar intraepithelial neoplasia, Asthma, Autosomal dominant
monocytopenia
(A)biotic stress effect on eukaryotic cells, Medicine resistance cancer cells, Multiple myeloma
>5856 1566501 at
Autosomal dominant monocytopenia, Atopic dermatitis, Tendinopathy, (A)biotic stress effect on
eukaryotic cells, HBV-associated, ALF, Unresectable colorectal cancer, Prostate cancer, Radiation
and leukemia, Multistep pancreatic carcinogenesis, Familia 1 hypercholesterolemia and
atherosclerosis, Francisella infection, Systemic lupus erythematosas, Endometriosis, Nephroblastoma,
Asthma, Obesity, Polycystic ovary syndrome, Pediatric acute leukemia, Liver transplantation
tolerance, Medicine resistance cancer cells, Multiple sclerosis
>3595 1557580 at
Chronic B-lymphocytic leukemia, Acute myeloid leukemia, Systemic javenile idiopathic arthritis,
Tuberculosis, Ovarian endometriosis, Papillary thyroid carcinoma, HBV-associated, ALF, Tibial
muscular dystrophy, Respiratory syncytial virus infection, Embryonic development, Adenoid cystic
carcinoma, Sjögren's syndrome, Heart failure, Prostate cancer, Sonic hedgehog homolog,
Teratozoospermia, Staphylococcus aureus infection, Systemic lupus erythematosus, Inflammatory dilated
cardiomyopathy, Intracranial arterial aneurysm, Asthma, Metaphase II stage oocytes maturation, Liver
transplantation tolerance, Pulmonary sarcoidosis (A)biotic stress effect on eukaryotic cells,
Medicine resistance
cancer cells,
>9831 234753 x at
Chronic B-lymphocytic leukemia, Clear cell renal cell carcinoma, Ovarian endometriosis, Leishmania
major infection, (A)biotic stress effect on eukaryotic cells, Medicine resistance cancer cells,
Tibial muscular dystrophy, Embryonic development, Sjögren's syndrome, Cystic fibrosis, Multiple
sclerosis, Obesity, Synchronous and metachronous liver metestases, Anaplasma phagocytophilum
infection, Teratozoospermia, Francisella tularensis infections,
>3020 1563721 at
Colorectal cancer, House dust mite allergy, Preeclampsia, Rotavirus infection, Invasive ductal,
Multiple sclerosis, Alzheimer's
disease, Pituitary gonadotrope tumors, Respiratory syncytial
virus infection, Invasive ductal carcinoma, EPV16 infection, Multistep pancreatic carcinogenesis,
Pancreatic cancer
>4331 205183 at
Dystccic myometrium, Parkinson's disease, Measles, Rhinovirus infection, Essential thrombocythemia,
Cryptosporidium infection, Fetal lung development, Heart failure, RSV infection, Francisella
tularensis infections, Retinoblastoma, Dermatomyositis, ADH with Breast cancer, Anaplasma
phagocytophilum infaction, Neuroblastoma, Utcrinc fibroid, Glioblastoms pscudopalisading colls,
Retinoblastoma, Dermatomyositis, Muscle functioning and aging, Porphyromonas gingivalis, Kaposi
sarcoma, Inflammatory dilated cardiomyopathy, Early onset colorectal cancer, Staphylococcus aureus
infection, Chlamydia pneumonia infection, Chronic pediatric immune thrombocytopenia, Acute myelcid
leukemia, Obesity, Asthma atopic, Metaphase II stage oocytes maturation, Social isolation (A)biotic
stress effect on eukaryotic cells, Medicine resistance cancer cells
>8960 1560118 at
Growth factor effects on pancreatic adenocarcinoma, Metaphase II stage oocytes maturation,
Teratozoospermia, House dust mite allergy, Chlamydia pneumonia infection, Colorectal cancer,
Optineurin depletion, Medicine resistance cancer cells, Epithelium response to cigarette smoke and
estradiol, Dystocic myometrium, Intracranial arterial aneurysm, Gastric tubular adenocarcinoma,
Kaposi's sarcoma, HPV16 infection, Prostate cancer, Influenza virus infection, Aspergillus infection,
Acute myeloid
Leukemia, Cryptosporidium infection, Psoriasis, Plasmodium infection, Pituitary gonadotrope tumors,
Staphylococcus aureus infection, Alzheimer's Oisease
>3595 1566541 at
Head and neck squamous cell carcinoma tumors harboring HPV
(A)biotic stress effect on eukaryotic cells, Medicine resistance cancer cells, Aldosterone-producing
adeonoma, Colorectal cancer, Vulvar intraepithelial neoplasia, ISCU myopathy, Pulmonary sarcoidesis,
Hereditary gingival fibromatosis, House dust mite allergy, Autosomal dominant monocytopenia,
Optineurin depletion, Prechondrocytes, Heart failure, Prostate cancer, Influenza virus infection,
Aspergillus infection, Trypanosoma cruzi infection, Bipolar disorder, Embryonic development, Multiple
sclerosis, RSV infection, Inflammation vascular epithelial cells, Nodular lymphocyte-predominant,
Hodgkin lymphoma, Atopic dermatitis, Training resistance skeletal muscle, Tendinopathy,
Schizophrenia, Rotavirus infection
>8384 216692 at
Hereditary gingival fibromatosis (A)biotic stress effect on eukaryotic cells, Essential
thrombocythemia, Pancreatic ductal adenocarcinoma, Colorectal adenoma formation, Psoriasis, Type 2
diabetic, Chronic myelogenous leukemia, Fetal lung development, Melanocyte to melanoma
transformation, Prechondrocyte differentiation, T-cell prolymphocyzic leukemia, Preeclampsia B-cell
chronic lymphocytic leukemia, Sjögren's syndrome, Adenoid cystic carcinoma, Influenza virus
infection, Untreated juvenile dermatomyosites, Ewing family tumor, Familial combined hyperlipidemia,
Intracranial arterial aneurysm, Systemic lupus erythematosus, Dystocic myometrium, House dust mite
allergy, Liver transplantation tolerance, Chronic obstructive pulmonary disease, Medicine resistance
cancer cells, Anaplasma phagocytophilum infection Testosterone effect on skeletal muscles of HIV-
infected males,
>1038 1554963 at
Hereditary gingival fibromatosis, Teratozoospermia, Liver transplantation tolerance, Endometriosis,
Leishmania major infection, Multiple sclerosis, Plasmodium infection, Nodular lymphocyte-predominant,
Hodgkin lymphoma, Uveal melanoma, Influenza virus infection, Ulcerative colitis, Embryonic
development, Prechoncrocyte differentiation, Erythroid differentiation, Francisella tularensis
infections, Sjögren's syndrome, Colon cancer,
(A)biotic stress effect on eukaryotic cells, Newly diagnosed and chronic pediatric immune
thronbocytopenia, Medicine resistance cancer cells, Aldosterone-producing adeonoma, Autosomal
dominant monocytopenia, Systemic lupus erythematosus, Inflammatory dilated cardiomyopathy, Asthma
Obesity,
>185 1569182 at
Herpesvirus-8 infection, Preeclampsia, Pancreatic ductal adeno, Carcinoma, Alzheimer's disease,
Colorectal adenoma formation, Muscle training, Prostate cancer, Hepatitis C, Virus infection,
Cerebral aging, Tuberculosis, Endometriosis, Breast cancer, Adrenocortical adenomas, Influenza virus
infection, Multiple sclerosis, Prechondrocyte differentiation, Fetal lung development, Aldosterone-
producing adeonoma, Kaposi's sarcoma, Autosomal dominant monocytopenia, Optineurin depletion,
Papillary thyroid cancer, Teratozoospermia, Metaphase II stage oocytes maturation
(A)biotic stress effect on eukaryotic cells, Medicine resistance cancer cells,
>6399 243768 at
Human herpesvirus-8 infecfion, Influenza virus infection, Rheumatoid arthritis, Glioblastoma brain
tumors, Hepatitis C, Virus infection, Clear cell renal cell carcinoma, Ovarian endometriosis, Various
muscle diseases, Tuberculosis, Nodular lymphocyte-predominant, Hodgkin lymphoma, Williams-Beuren,
Syndrome, Asthma, Cibial muscular dystrophy, Plasmodium infection, Psoriasis, Embryonic developnbnt,
Erythroid differentiation, Fetal lung development, Duchenne, Muscular, Dystrophy, Multistep
pancreatic carcinogenesis, Inflammatory bowel disease, Tibolone hormone ettect on postmenopausal
endometrium, Hepatocellular carcinoma, Sjögren's syndrome, Prostate cancer, Familial
hypercholesterolemia and atherosclerosis, Aldosterone-producing adeonoma, Aging effect, HPSC,
Pituitary adenoma predisposition, Liver transplantation tolerance, Autosomal dominant monocytopenia,
Systemic lupus erythematosus, Synchronous and metachronous liver metastases, Early onset colorectal
cancer, Preeclamosia, Fetal and adult reticulocytes, Medulloblastoma, Obesity, Polycystic ovary
syndrome, Chronic pediatric inmune thrombocytopenia, Pulmonary sarcoidesis, Muscle function and aging
(A)biotic stress effect on eukaryotic cells, Medicine resistance cancer cells
>1038 1554964 x at
IGHV mutated/unmutated, Mantle, Cell, Lymphoma, Colorectal adenoma formation, Placental malaria,
Multiple sclerosis, Sjögren's syndrome, HBV-associated, ALF, Colon cancer cells, Multistep pancreatic
carcinogenesis, Francisella tularensis infection, Familial hypercholesterolemia and atherosclerosis,
Metaphase II stage oocytes maturation, Preeclampsia, Endometriosis, Chlamydia pneumonia infection,
Pituitary adenoma predisposition, Early onset colorectal cancer, House dust mite allergy, Liver
transplantation tolerance, Hereditary gingival fibromatosis, Infantile-onset, Pompe disease
(A)biotic stress effect on eukaryotic cells, Medicine resistance cancer cells
>8678 230461 s at
Inflammatory dilated cardiomyopathy, Prostate cancer, Colon cancer, Medicine resistance cancer cells,
Bipolar Disorder, Autophagy, Type II Diabetes, Hepatitis B virus, (HBV)-associated acute liver
failure, (ALF) patheots, Multiple Sclerosis, Interstitial lung disease
>8195 215958 at
Intracranial arterial aneurysm, Cryptosporidium infection, Pituitary adenoma subtypes, Essential
thrombocythemia, Alzheimer's disease, Colorectal adenoma formation, Placental malaria, Melanoma
progression, Hyperinsulinemia, (A)biotic stress effect on eukaryotic cells, Staphylococcus aureus
infection, Papillary thyroid carcinoma, HBV-associated, ALF, Hungington's disease, Ovarian cancer, B-
cell chronic lymphocytic leukemia, Prechondrocyte differentiation, Sjögren's syndrome, Prostate
cancor, Juvenilc dermatomyositis, Cystic fibrosis, HIV infection, Clioblastoma, Colorectal cancer,
Aldosterone-producing adeonoma, Dermatomyositis, Kaposi sarcoma, Porphyromonas gingivalis infection,
Medicine resistance cancer cells
>4331 1557335 at
Intracranial arterial aneurysm, Pancreatic ductal adenocarcinoma, Probiotic effect, Sonic hedgehog
homolog, Plasmodium infection, Prechondrocyte differentiation, Influenza virus infection, Obesity
(A)biotic stress effect on eukaryotic cells, Medicine resistance cancer cells, Cerebral
adrenoleukodystrophy,
>5856 234247 at
Leukemia, House dust if allergy, Atopic dermatitis, Multiple
Sclerosis, Renal cell carcinonh, Pituitary gonadotrope tumors, Psoriasis, Cystic fibrosis, Type 2
diabetes, Parkinson's disease, Myeloma, Prechondrocytes pancreatic cancer, Medicine resistance
cancer cells, Optineurin depletion, EPC response on exercise, Intracranial arterial aneurysm,
Metachronous liver metastases, HIV infection, Cushing's Syndrome, Sonic hedgehog homolog acute
myocardial infarctior, Heart failure, Aspergillus infection, Influenza infection, Lung cancer, Acute
myeloid leukemia, Endometrium and menstrual cycle, Embryonic development, Ovarian cancer,
Cryptosporidium infection, Prostate cancer
>2700 1556521 a at
Liver metastases, Heart failure, Type 2 diabetes, Plasmodium falciparum infection, HIV and SIV
infection, Breast cancer, Medicine resistance cancer cells, Optineurin depletion, Neural tube defect,
Metaphase II stage oocytes, Polycystic ovary syndrome, Vulvar intraepithelial neoplasia, Childhood
cerebral adrenoleukodystrophy
>3395 217482 at
Liver transplantation tolerance, Colorectal acenoma formation, SCTD, Acute myeloid leukemia,
Mitochondrial encephalomyopathies, Biomaterial engineering, Presymptomatic and symptomatic malaria,
Sarcoma, Ovarian endometriosis, Myelodysplastic syndrome, Dermatomyositis, Asthma, Prostate cancer,
HIV infection, Unresectable colorectal cancer, Erythroid differentiation, Ulcerative colitis,
Embryonic development, Fetal lung development, Influenza virus infection, Sjögren's syndrome,
Alzheimer's disease, Myelodysplastic syndromes, Scleroderma, Infant biliary atresia,
Teratozoospermia, Ductal carcinoma
(A)biotic stress effect on eukaryotic cells, Medicine resistance cancer cells, Polycystic ovary
syndrome
>63 1565857 at
Mantle Cell, Lymphoma, Intracranial arterial aneurysm, Nephroblastoma, Autosomal dominant
monocytopenia, Pulmonary sarcoidosis epithelium response cigarette smoke, Optineurin depletion,
Colorectal cancer, Hormone effect cancer cells, Chlamydia pneumonia infection, Tolerant renal
transplant recipients, HPV16 infection, Prostate cancer, HIV/SIV infection, Medicine resistance
cancer cells, Pancreatic carcinogenesis, Sjögren's syndrome, Aspergillus infection, Preeclampsia,
Embryonic development, Stress exposure skeletal muscle, HIV-associated neurocognitive disorders, Type
2 diabetes, Plasmodium falciparum infection, Parkinson's disease, Multiple sclerosis
>7988 1557774 at
Medicine resistance cancer cells, (A)biotic stress effect on eukaryotic cells, Intracrnial arterial
aneurysm, Polycystic ovary syndrome, Obesity, Teratozoospermia, Chronic B-lymphocytic leukemia,
Pulmonary sarcoidosis, Eosinophilic esophagitis, Staphylococcus aureus infection, Pancreatic, Tumor,
Colorectal cancer, Hereditary gingival fibromatosis, SIV virus infection cytokine effect on immune
cells, Pediatric immune thrombocytopenia, HPV16 virus infection, Prostate cancer, Kaposi's sarcoma,
Aspergillus infection, Hepatitis C virus infection, Muscle response to weight loss, HIV-associated
neurocognitive disorders, RSV virus infection, Psoriasis, Plasmodium infection, Prostate cancer,
Hepatitis B virus, (ALF), Burkitt lymphoma subtypes, Medulloblastoma, Malaria, Notch-on/off effects
oF T-lymphoblastic leukemia cells, Alzheimer's disease
>3595 1557581 x at
Medicine resistance cancer cells, Alzheimer's disease, Tuberculosis, Idiopathic pulmonary fibrosis,
Ovarian endometriosis, HIV-associated neurocognitive impairment, Acute myeloid leukemia, Obesity,
Tibial muscular dystrophy, Influenza virus infection, Neuroblastoma, Asthma, Prostate cancer,
Sjögren's syndrome, Colon cancer, Pulmonary sarcoidosis, Liver transplantation tolerance, Metaphase
II stage oocytes maturation (A)biotic stress effect on eukaryotic cells colecteral cancers,
>7665 234574 at
Medicine resistance cancer cells, Chronic B-lymphocytic leukemia, Transplantation resistance,
Multiple sclerosis, Obesity, Vitamine D effect smooth muscle cells, Pulmonary sarcoidosis, Polycystic
ovary syndrome, Jnruptured intracranial arterial aneurysm, Teratozoospermia, Francisella tularensis
infection, Hormone effect breast cancer cells, Fungal infection, Inflammatory bowel disease, Multiple
sclerosis, Aids related lymphomas
>8195 224086 at
Medicine resistance cancer cells, Pancreatic ductal adenocarcinoma, Medulloblastomas in children,
Idiopathic pulmonary fibrosis, Prechondrocyte differentiation, Probiotic effect on inflamed colonic
explants, Cardiothoracic surgery effect on diaphragm, Tuberculosis, Hutchinson-Gilford progeria
syndrome, Cryptosporidium infection, Fetal Lung development, Familial hypercholesterolemia and
atherosclerosis, Papillary thyroid cancer, Autosomal dominant monocytopenia, Schizophrenia,
Aldosterone-producing adeonoma, Chronic B-lymphocytic leukemia, Optineurin depletion, Metaphase II
stage oocytes maturation, Intracranial arterial aneurysm
(A)biotic stress effect on eukaryotic cells ISCU myopathy
>5927 241867 at
Medicine Desistance cancer cells, Rhinovirus infection, Idiopathic pulmonary fibrosis, AIDS-related
lymphomas, Acute myeloid leukemia, Placental malaria, HIV-associated neurocognitive impairment,
Cardiothoracic surgery, Multiple sclerosis, Nodular lymphocyte-predominant, Hodgkin Lymphoma, HBV-
associated, ALF, Tibial muscular dystrophy, Colorectal cancer primary cr metastatic Lesions,
Inflammatory bowel disease, Parkinson's disease Erythroid differenziation Prechondrocyte
differentiation, Embryonic development, Fetal lung development, Duchenne, Muscular, Dystrophy,
Pancreatic cancer, Optineurin depletion Sjögren's syndrome Ductal carcinoma Franciseila novicida
infections, Polycystic ovary syndrome, Obesity, House dust mite allergy, Chlamydia pneumonia
infection, Systemic lupus erythematosus, Childhood cerebral adrenoleukodystrophy, Multiple sclerosis,
Asthma, Chronic pediatric immune thrombocytopenia, Intracranial arterial aneurysm, Multiple myeloma,
Aldosterone-producing adeonoma, (A)biotic stress effect on eukaryotic cells
>4475 1559434 at
Medicine resistance cancer cells, Tuberculosis, HBV-associated, ALF, Influenza virus infection,
Inflammatory dilated cardiomyopathy, Aldosteronc-producing adconoma, Cushing's Syndromc, (A)biotic
stress effect on eukaryotic cells
>6860 237187 at
Medulloblastoma, Chronic lymphocytic leukemia, Prostate cancer, Pompe disease, Intracranial arterial
aneurysm, Hereditary gingival fibromatosis, Hereditary gingival fibromatosis, Medicine resistance
cancer cells, Hepatitis C Virus infection
>5927 1558889 at
Metaphase II stage oocytes maturation, Influenza infection, Melanoma progression, Systemic lupus
erythematosus and arthritides, Tuberculosis, Alzheimer's disease, Bronchopulmonary dysplasia, Muscles
response exercise and age, Parkinson's disease, Embryonic development, Respiratory syncytial virus
infection, Erythroid differentiation, Heart failure, (A)biotic stress effect on eukaryotic cells,
Heart failure, Early onset colorectal cancer, Chlamydia pneumonia infection, Medicine resistance
cancer cells, Newly ciagnosed and chronic pediatric immune thromb ocytopenia, Aldosterone-producing
adeonoma, Active tuberculosis
>4064 1569416 at
Metaphase II stage oocytes matured, Pancreatic ductal adenocarcinoma, Notch-on/off effects on T-
lymphoblastic leukemia cells, Acute myeloid leukemia, Ulcerative colitis, Melanoma progression,
Tuberculosis, Inflammation vascular epithelial cells, Influenza virus infection, Prostate cancer,
HIV-associated neurocognitive disorders, Francisella tularensis infections, Chronic pediatric immune
thrombocytopenia, Inflammatory dilated cardiomyopathy, Intracranial arterial aneurysm, Childhood
cerebral adrenoleukodystrophy, (A)biotic stress effect on eukaryotic cells, Medicine resistance
cancer cells,
>4865 242495 at
Metaphase TT stage oocytes matured, Early and advanced idiopathic pulmenary fibrosis, Multiple
sclerosis, Placental malaria, Colorectal cancer tumors, Endometriosis, HBV-associated, ALF,
Rhinovirus infection, Embryonic development, Aspergillus infection, Tolerant renal transplant
recipients, Familial hypercholesterolemia and atherosclerosis, Muscle functioning and aging,
Infantile-onset, Pompe disease, Polyomavirus infection, House dust mite allergy, Synchronous and
metachronous liver metastases, EPC response to exercise, Limb girdle muscular dystrophy 2, Obesity,
Pancreatic, Tumor, Neural tube defect, Optineurin depletion, (A)biotic stress effect on eukaryotic
cells Medicine resistance cancer cells,
>8823 220874 at
Multiple myeloma, Chronic B-lymphocytic leukemia, Hepatitis C virus infection, Colorectal cancer,
Teratozoospermia, Medicine resistance cancel cells, COPD lymphoma, Dermatomyositis, Hereditary
gingival fibromatosis, Liver cancer metastasis, Staphylococcus aureus infection, Alcoholic hepatitis
Primary immunodeficiency syndrome Retinoblastomas Asthma, House dust mite allergy, Candida albicans
infection, Hyperlipidemia, Optineurin depletion, Esophagitis, Adenoid cystic carcinoma, HIV
infection, Breast cancer, Toxcplasma gondii infection, Influenza infection, Glioblastoma, Melanoma,
Burkitt lymphoma, Multiple sclerosis, HIV-associated neurocognitive disorders, Psoriasis, Tibial
muscular dystrophy, Hepatitis B virus, (ALF), Acute myeloid leukemia, Presymptomatic and symptomatic
malaria
>4331 238812 at
Multiple sclerosis, Chronic B-lymphocytic leukemia, Plasmodium infection, Acute myeloid leukemia,
Multiple sclerosis, Ovarian endometriosis, Tibial muscular dystrophy, Erythroid differentiation,
Prostate cancer, Endometrium and menstrual cycle, Inflammatory bowel disease, Sjögren's syndrome,
Multistep pancreatic carcinogenesis, Hepatocellular carcinoma, Active tuberculosis, (A)biotic stress
effect on eukaryotic cells, Papillary thyroid cancer, Fetal and adalt reticulocytes, Aldosterone-
producing adeonoma, Muscle function and aging - female, Medicine resistance cancer cells, Asthma
>8195 238301 at
Muscle aging, T-cell acute lymphoblastic leukemia, Medicine resistance cancer cells, Cellular
response to compounds, Teratozoospermia, Chlamydia pneumonia infection, Polycystic ovary syndrome,
Optineurin depletion, Pancreatic, Tumor, Intracranial arterial aneurysm, Preeclampsia, Glioblastoma,
COPD, HPV16 infection, Cushing's syndrome, Breast cancer, Influenza virus infection, Aspergillus
infection, Inflammatory bowel disease, Preeclampsia, Prechondrocyte differentiation, Embryonic
development, Ovarian cancer, Leukemia, Stress effect on skeletal muscle, Prostate cancer, Multiple
sclerosis, Psoriasis, Staphylccoccus aureus infection, Hutchinson-Gilford progeria syndrome, Notch-
on/off effects on T-lymphoblastic leukemia cells, Pancreatic ductal adenocarcinoma, Parkinson's
disease, Rotavirus infection
>4331 242256 x at
Muscle function and aging, Parkinson's disease, Early and advanced idicpathic pulmonary fibrosis,
Williams-Beuren Syndrome, Multiple sclerosis, Alzheimer's disease, Glioblastoma, Tuberculosis,
Plasmodium infection, Fetal lung development, Cryptosporidium infection, Influenza virus infection,
Embrionic development, Aspergillus intection, Prostate cancer ISCU myopathy, Papillary thyroid
cancer, Chlamydia pneumonia infection, Obesity, Polycistic ovary syndrome, Vulvar intraepithelial
neoplasia, Quiescent systemic lupus erythematosus, Synchronous and metachronous liver metastases,
Hereditary gingival fibromatosis, EPC response to exercise, Aldosterone-producing adeonoma, Pituitary
adenoma predisposition, Prechondrocytes, (A)biotic stress effect on eukaryotic cells, Medicine
resistance cancer cells,
>7461 216767 at
Muscles and weight loss, RSV infection, Idiopathic pulmonary fibrosis, Presymptomatic and symptomatic
malaria, Tuberous sclerosis ccmplex hamartomas, Systemic lupus erythematosus and arthritides,
Neisseria meningitidis infection, Rheumatoid arthritis, Adenocarcinoma, Radioresistant tumor
response, Sindbis virus infection, Multistep pancreatic carcinogenesis, Essential thrombocythemia, T-
cell prolymphocytic leukemia, B-cell chronic lymphocytic leukemia, Embryonic development,
Preeclampsia, Duchenne, Muscular, Dystrophy, Myelodysplastic syndrome, Influenza virus infection,
Huntington's disease, Familial hypercholesterolemia and atherosclerosis, Liver transplantation
tolerance, Metaphase II stage oocytes maturation Staphylococcus aureus infection Prostate cancer
Nephrosclerosis Multiple sclerosis Pulmonary type II cell differentiation Chronic pediatric immune
thrombocytopenia Chlamydia pneumonia infection Polycystic ovary syndrome Retinoblastoma Diamond-
Blackfan anaemia Papillary thyroid cancer Melanoma metastasis Obesity Carious pulpal tissue Asthma
Nasopharyngeal carcinoma Aldosterone-producing adeonoma Porphyromonas gingivalis infection
Intracranial arterial aneurysm (A)biotic stress effect on eukaryotic cells Medicine resistance cancer
cells Dermatomyositis,
>2836 1562642 at
Nephroblastoma Obese HBV virus infection Intracranial arterial aneurysm Medicine resistance cancer
cells Optineurin depletion Colorectal cancer Fanccreatic Tumor HPV16 infection Plasmodium falciparum
infection Prostatc cancer Colcrectal cancer metastatic lesions
>6113 1566425 at
Oocytes metaphase Medicine resistance cancer cells Granulocyte
colony-stimulating factor mobilized leukocytes Parkinson's disease
>250 1569603 at Pancreatic tumor Embryonic development Adenoid cystic carcinoma Ovarian cancer Colon
cancer Invasive ductal and lobular breast carcinomas Influenza viris infection Hormone effect on
postmenopausal endometrium Familial hypercholesterolemia and atherosclerosis Francisella novicida
infection Medicine resistance cancer cells (A)biotic stress effect on eukaryotic cells Metaphase II
stage oocytes maturation Chlamydia pneumonia infection Early onset colorectal cancer Sonic hedgehog
homolog
>6009 1562553 at
Papillary thyroid cancer (A)biotic stress effect on eukaryotic cells Medicine resistance cancer cells
Optineurin depletion PDCCE tumor Pancreatic tumor Pituitary adenoma predisposition Acute myeloid
leukemia Staphylococcus aureus infection Cushing's syndrome Prostahe cancer HPV16 virus infection
Heart failure Aspergillus infection Influenza virus infection Ovarian cancer Prechondrocyte
differentiation Plasmodium infection Hepatitis B virus infection (ALF) Embryonic development
>8407 241468 at
Papillary thyroid cancer Breast cancer Multiple Sclerosis Plasmodium falciparum infection
Prechondrocyte differentiation Lung carcinoma Influenza virus infections Herpesvirus infection
Prostate cancer Chronic B-lymphocytic leukemia Medicine resistance cancer cells Intracranial arterial
aneurysm Liver transplantation tolerance Simian immune deficiency virus infection Multiple Sclerosis
Optineurin depletion
>676 233235 x at
Polycystic ovary syndrome Obesity (A)biotic stress effect on eukaryotic cells Stage I endometrial
cancer Skeletal muscle and age Endometriosis Ovarian endometriosis Prostate cancer Embryonic
development Preeclampsia Prechondrocyte differentiation Duchenne Muscular Dystrophy Heart failure
Adenoid cystic carcinoma Chronic B-lymphocytic leukemia Liver transplantation
tolerance Metaphase II stage oocytes maturation Autosomal dominant monocytopenia
Teratozoospermia Intracranial arterial aneurysm Muscle function and aging - male Medicine resistance
cancer cells Chronic pediatric immune thrombocytopenia
>9005 234654 at Polyomavirus JCV infection Teratospermia Medicine resistance cancer cells Simian
immune deficiency virus infection Francisella
tularensis infection Prechondrocyte differentiation Multiple Sclerosis Mycobacterium
tuberculosis infection
>9101 1562586 at
Prostate cancer Intracranial arterial aneurysm Influenza virus infection Medicine resistance cancer
cells Plasmodium falciparum infection Rheumatoid arthritis Tendinopathy Pancreatic ductal
adenocarcinoma
>8198 1560230 at
Pulmonary sarcoidosis (A)biotic stress effect on eukaryotic cells Psoriasis Lassa fever Tendinopathy
Jlcerative colitis Melanoma progression Ovarian endometriosis Cervical cancer tumors Papillary
thyroid carcinoma Pituitary genadotrope tumors Tibial muscular dystrophy Plasmodium infection
Parkinson's disease Embryonic development Ovarian cancer Prechondrocyte differentiation Endometrium
and menstrual cycle Adenoid cystic carcinoma Influenza virus infection Tibolone hormone effect
on postmenopausal endometrium Pancreatic cancer Small cell lung cancers Sjögren's syndrome
Aspergillus infectior Basal-like breast cancer tumors Hepatitis C virus infection Francisella
novicida infections Obesity HIV infection Papillary thyroid cancer Chronic B-lymphocytic leckemia
Polycystic ovary syndrome Chronic pediatric immune thrombocytopenia House dust mite allergy Medicine
resistance cancer cells Autosomal dominant monocytopenia
>4064 1561737 atSchizophrenia Chronic B-lymphocytic leukemia Medicine resistance cancer cells Obesity
Acute myeloid leukemia Chlamydia
pneumonia infection Acute myccardial infarction Pulmonary sarcoidosis Hormone effect cancer cells
Immature dendritic cell response to hypoxia Chromophobe renal cell carcinoma Hereditary gingival
fibromatosis Metaphase II stage oocytes maturation HIV and SIV infection Aspergillus infection
Sjögren's syndrome Embryonic development Prechondrocyte differentiation HIV-associated
neurocognitive disorders Psoriasis Inflammation
vascular epithelial cells Staphylococcus aureus infection
Hodgkin and non-Hodgkin lymphoma Notch-on/off effects on
T-lymphoblastic Leukemia cells>6914 1564984 at Sepsis Obesity Medicine resistance cancer cells
Jnruptured intracranial arterial aneurysm Pituitary adenoma predisposition Acute leukemia Vulvar
intraepithelial neoplasia Interleukin therapeutic Polycystic ovary syndrome House dust mite allergy
Multiple Sclerosis Optineurin depletion Prostate cancer linoleic acid isomers exposure response
Influenza infection Fungi infection Pancreatic cancer IFNß-1a treatment multiple sclerosis patients
Idiopathic pulmonary fibrosis
>8792 242795 at
Sepsis Optineurin depletion Medicine resistance cancer cells Teratozoospermia Pancreatic cancer
Polyomavirus JCV resistance Prostate cancer progression Cystic fibrosis COPD Cryptosporidium
infection Type 2 diabetes Inflammation vascular epithelial cells Tibial muscular dystrophy
Staphylococcus aureus infection
>7129 1555664 at
Sepsis Sickle cell disease Metaphase II stage oocytes maturation Intracranial arterial aneurysm
Hormone effect on cancer cells Dystocic myonetrium Medicine resistance cancer cells Optineurin
depletion Schizophrenia Aids Colorectal cancer Pituitary adenoma Familial hypercholesterolemia and
atherosclerosis linoleic acid isomers effect on eukaryotic cells Hepatitis C virus infection
Influenza virus infection Prostate cancer Preeclampsia Embryonic development Ovarian cancer Notch-
on/off effects on T-lymphoblastic leukemia cell lines
>8195 215928 at
Systemic lupus erythematosus Colon cancer Pompe disease Sepsis Medicine resistance cancer cells
Asthma Cellular responds do compounds Limb girdle muscular dystrophy Down syndrome Aldosterone-
producing adeonoma Chlamydia infection Dystocic myometrium Vulvar intraepithelial neoplasia COPD
Pulmonary sarcoidosis Ewing family tumor and neuroblastoma comparison In
flammatory dilated cardiomyopathy Obesity SIV virus infection Smoking effect on B lymphocytes in
females Nephroblastoma Idiopathic yelofibrosis Kaposi sarcoma Toxoplasma gondii infection Rheumatoid
arthritis Bipolar disorder Prechondrocyte differentiation Cryptosporidium infection Tibial muscular
dystrophy Renal clear cell carcinoma Hungington's disease Adenocarcinoma
Ewing Sarcoma Malaria CD4+ T cell differentiation Exercise effect on whitc blood cells
Celiac disease Notch-on/off effects on T-lymphoblastic leukemia cells SCID disease Essential
thrombocythemia Pituitary adenoma subtypes
>9342 242924 at
Teratospermia myeloma Prechondrocyte differentation Alzheimer's disease
>5170 1561642 at
Teratozoospermia Pituitary gonadotrope tumors Tendinopathy Tuberculosis Preeclampsia Prostaue cancer
Multiple sclerosis Cryptosporidium infection RSV infection Embryonic development Ovarian cancer
Sjögren's syndrome Francisella tularensis infections Heart failure HIV infection Obesity (A)biotic
stress effect on eukaryotic cells Medicine resistance cancer cells,
>8960 1559724 at
Therapeutic or toxin effects on cell lines Chronic B-lymphocytic leukemia Autosomal dominant
monocytopenia Vulvar intraepithelial neoplasia Medicine resistance cancer cells Optinetrin depletion
Asthma Francisella tularensis infections Basal-like breast cancer tumors Hepatitis C Virus infection
Ovarian cancer HIV-associated neurocognitive disorders Psioriasis Leishmania infection Endotoxin
effect immune cells Notch-on/
off effects on T-Lymphoblastic leukemia cells

List 2

>639_205481_at
adenosine, dyphylline, aspirin/butalbital/caffeine, acetaminophen/caffeine/dihydrocodeine,
acetaminophen/aspirin/caffeine, caffeine/ergotamine, aspirin/caffeine/propoxyphene,
aspirin/butalbital/caffeine/codeine, aspirin/caffeine/dihydrocodeine, caffeine/ethanol,
acetaminophen/butalbital/caffeine, aminophylline, aspirin/caffeine/orphenadrine, clofarabine,
acetaminophen/butalbital/caffeine/codeine, theophylline, pentoxifylline, caffeine, theobromine,
tecadenoson, acetaminophen/caffeine/chlorpeniramine/hydrocodone/phenylephrine
>676_202707_at
pyrazofurin, gimeracil/oxonic acid/tegafur, oxonic acid
>6131_210005_at
bevacizumab/pemetrexed, gemcitabine/pemetrexeby pemetrexed
>6431_206482_at
vandetanib
>6647_206070_at
SF 1126, PX-866, PI3Kg inhibitor, dactolisib, pictilisib, buparlisib, XL147, PQR309, RP6530
>6661_237469_at
novobiocin, etoposide, teniposide, CPI-0004Na, becatecarin, elsamitrucin, AQ4N, elomotecan,
tafluposide, fleroxacin, cyclophosphamide/epirubicin/5-fluorouracil, cytarabine/daunorubicin,
finafloxacin, hydrocortisone/mitoxantrone, mitoxantrone/prednisone,
cladribine/cytarabine/daunorubicin, cytarabine/daunorubicin/tretinoin, cytarabine/idarubicin,
idarubicin/mitoxantrone/tretinoin, arsenic trioxide/daunorubicin/tretinoin, cytarabine/etoposide,
cytarabine/etoposide/mitoxantrone, cytarabine/mitoxantrone, daunorubicin/tretinoin,
idarubicin/tretinoin, bortezomib/dexamethasone/doxorubicin, cisplatin/doxorubicin/methotrexate,
cyclophosphamide/epirubicin, cyclophosphamide/etoposide,
cisplatin/doxorubicin/ifosfamide/methotrexate, cisplatin/doxorubicin,
cyclophosphamide/docetaxel/epirubicin/5-fluorouracil/trastuzumab,
clofarabine/cyclophosphamide/etoposide, cyclophosphamide/epirubicin/vincristine,
bortezomib/doxorubicin, carboplatin/doxorubicin, cladribine/cytarabine/filgrastim/mitoxantrone,
epirubicin/5-fluorouracil/oxaliplatin, dacarbazine/doxorubicin, cytarabine/filgrastim/fludarabine
phosphate/idarubicin, capecitabine/epirubicin/oxaliplatin, doxorubicin/ifosfamide,
cladribine/cytarabine/filgrastim/idarubicin, doxorubicin/streptozocin,
dacarbazine/doxorubicin/ifosfamide, dexamethasone/fludarabine phosphate/mitoxantrone,
cyclophosphamide/etoposide/prednisone/rituximab/
vincristine, cyclophosphamide/fludarabine phosphate/mitoxantrone/rituximab, fludarabine
phosphate/mitoxantrone/rituximab, cyclophosphamide/mitoxantrone/prednisone/vincristine,
cyclophosphamide/etoposide/prednisone/vincristine, dexamethasone/fludarabine
phosphate/mitoxantrone/rituximab, chlorambucil/mitoxantrone/prednisone, fludarabine
phosphate/mitoxantrone, cyclophosphamide/fludarabine phosphate/mitoxantrone,
alemtuzumab/cyclophosphamide/fludarabine phosphate/mitoxantrone,
cyclophosphamide/mitoxantrone/prednisone/rituximab/vincristine,
cladribine/cytarabine/filgrastim/idarubicin/plerixafor, doxorubicin/tretinoin,
cytarabine/doxorubicin, chlorambucil/mitoxantrone/prednisone/rituximab, docetaxel/epirubicin,
doxorubicin/paclitaxel, epirubicin/paclitaxel, arsenic trioxide/idarubicin/tretinoin,
clofarabine/filgrastim/idarubicin, clofarabine/cytarabine/filgrastim/idarubicin,
cyclophosphamide/epirubicin/5-fluorouracil/vinorelbine, cyclophosphamide/epirubicin/5-
fluorouracil/paclitaxel/trastuzumab, cytarabine/idarubicin/sorafenib, cyclophosphamide/epirubicin/5-
fluorouracil/paclitaxel, cyclophosphamide/docetaxel/epirubicin/5-fluorouracil, mitoxantrone,
amsacrine, norfloxacin, dexrazoxane, tirapazamine, TAS-103, gatifloxacin, valrubicin, gemifloxacin,
nemorubicin, nalidixic acid, levofloxacin, epirubicin, doxorubicin, idarubicin, daunorubicin,
nodophyllotoxin, cis-sparfloxacin
>6713_229711_s_at
CGM097, DS-3032b, HDM201, RO5503781, RO6839921
>6811_207822_at
pazopanib, lenvatinib, nintedanib, regorafenib, bortezomib/sorafenib,
dexamethasone/lenalicomide/sorafenib, GSK3052230, lucitanib, cytarabine/idarubicin/sorafenib, 5-
azacytidine/sorafenib, decitabine/sorafenib, cebio 1347, ARQ 087, sulfatinib, everolimus/sorafenib,
sorafenib
>6811_224029_x_at
riluzole, zonisamide
>6859_244616_x_at
CGM097, DS-3032b, HDM201, RO5503781, RO6839921
>7567_210224_at
anti-thymocyte globulin (rabbit)
>7567_203672_x_at
olsalazine
>7984_1555572_at
methazolamide, hydrochlorothiazide, acetazolamide, trichloromethiazide, chlorothiazide,
chlorthalidone, benzthiazide, sulfacetamide, topiramate
>7384_1570200_at
cyclophosphamide/epirubicin/5-fluorouracil, cyclophosphamide/epirubicin,
cyclophosphamide/docetaxel/epirubicin/5-fluorouracil/trastuzumab,
cyclophosphamide/epirubicin/vincristine, epirubicin/5-fluorouracil/oxaliplatin,
capecitabine/epirubicin/oxaliplatin, docetaxel/epirubicin, epirubicin/paclitaxel,
cyclophosphamide/epirubicin/5-fluorouracil/vinorelbine, cyclophosphamide/epirubicin/5-
fluorouracil/paclitaxel/trastuzumab, cyclophosphamide/epirubicin/5-fluorouracil/paclitaxel,
cyclophosphamide/docetaxel/epirubicin/5-fluorouracil, epirubicin
>8015_208306_x_at
apolizumab
>8015_244689_at
choline fenofibrate, aleglitazar, fenofibric acid/rosuvastatin, atorvastatin/choline fenofibrate,
choline fenofibrate/simvastatin, ezetimibe/fenofibrate, fenofibrate/simvastatin, NS-22C,
tesaglitazar, bezafibrate, clofibrate, fenofibrate, docosahexaenoic acid, gemfibrozil
>8015_206792_x_at
dyphylline, nitroglycerin, caffeine/ergotamine, arofylline, tetomilast, L 869298, ibudilast,
aminophylline, anagrelide, cilomilast, milrinone, dipyridamole, L-326, 141, ketotifen, roflumilast,
tolbutamide, theophylline, pentoxifylline, caffeine
>8015_1552343_s_at
dyphylline, nitroglycerin, aminophylline, anagrelide, milrinone, dipyridamole, ketotefen,
tolbutamide, theophylline, pentoxifylline
>8015_1569748_at
pkc-zeta inhibitor, ingenol mebutate
>8015_216439_at
vemurafenib, osimertinib, cobimetinib/vemurafenib
>5925_201695_s_at
forodesine, PD 141955, purine nucleoside phosphorylase inhibitor
>5927_204920_at
N-carbamyl-L-glutamate
>5927_215179_x_at
aflibercept, aflibercept/irinotecan
>8195_207516_at
ABT-089, isoflurane, mecamylamine, succinylcholine, rocuronium, doxacurium, mivacurium, pipecuronium,
rapacuronium, metocurine, atracurium, cisatracurium, acetylcholine, nicotine, D-tubocurarine,
arecoline, ibogaine, enflurane, pancuronium, vecuronium
>8306_211265_at
misoprostol, prostaglandin E2, prostaglandin E1, diclofenac/misoprostol, bimatoprost
>8306_1569938_at
suramin
>8319_207554_x_at
S-18886, ridogrel, torsemide
>8319_1552648_a_at
trm-1
>19_221170_at
tesmilitene, triprolidine, buclizine
>8889_244677_at
avibactam
>8998_208828_at
bortezomib/cladribine/rituximab, gemcitabine/paclitaxel, cladribine/cytarabine/daunorubicin,
gemcitabine/oxaliplatin, gemcitabine/vinorelbine, docetaxel/gemcitabine,
docetaxel/gemcitabine/vincristine, cladribine/cytarabine/filgrastim, capecitabine/gemcitabine,
gemcitabine/oxaliplatin/paclitaxel, cladribine/cytarabine/filgrastim/mitoxantrone,
cladribine/rituximab, capecitabine/docetaxel/gemcitabine,
cladribine/cytarabene/filgrastim/idarubicin, bevacizumab/gemcitabine,
gemcitabine/oxaliplatin/rituximab, L-asparaginase/gemcitabine/oxaliplatin,
cladribine/cytarabine/filgrastim/idarubicin/plerixator, gemcitabine/irinotecan, 5-
fluorouracil/gemcitabine, cladribine/peginterferon alfa-2a, gemcitabine/pemetrexed,
cladribine/cytarabine/decitabine, cyclophosphamide/gemcitabine/prednisclone/rituximab/vincristine,
gemcitabine, cladribine
>9002_216288_at
zeneca ZD 3523, montelukast, zafirlukast, pranlukast
>9035_203989_x_at
chrysalin, vorapaxar, argatroban, bivalirudin
>921_211286_x_at
sargramostim, mavrilimumab, EPO/sargramostim, rituximab/sargramostim
>921_213475_s_at
efalizumab
>921_1561080_at
arsenic trioxide/tretinoin, arsenic trioxide/caunorubicin/tretinoin, arsenic trioxide/gemtuzumab
Ozogamicin/tretinoin, arsenic trioxide/idarubicin/tretinoin, ethaselen, arsenic trioxide
>9365_213631_x_at
teriflunomide, leflunomide
>1711_215365_at
amlodipine/hydrochlorothiazide/valsartan, amlodipine/telmisartan, aliskiren/amlodipine,
aliskiren/amlodipine/hydrochlorothiazide, nilvadipine, amlodipine/valsartan, amlodipine/perindopril,
amlodipine/benazepril, verapamil, mibefradil, enalapril/felodipine, amlodipine/atorvastatin,
nisoldipine, isradipine, felodipine, nimodipine, nitrendipine, amlodipine, nicardipine, nifedipine,
trandolapril/veapamil
>1723_210389_x_at
epothilone B, colchicine/probenecid, larotaxel, eribulin, davunetide, vintafolide, milataxel,
cevipabulin, gemcitabine/paclitaxel, docetaxel/prednisone, capecitabine/docetaxel,
paclitaxol/trastuzumab, cyclophosphamide/predrisone/vincristine, docetaxol/hydrocortisone,
cyclophosphamide/docetaxel, gemcitabine/vinorelbine,
cyclophosphamide/daunorubicin/imatinib/prednisone/vincristine,
cyclophosphamide/topotecan/vincristine, docetaxel/gemcitabine, docetaxel/gemcitabine/vincristine,
irinetecan/vincristine, irinotecan/temozolomice/vincristine, bevacizumab/paclitaxel,
cyclophosphamide/docetaxel/epirubicin/5-fluorouracil/trastuzumab, docetaxel/trastuzumab,
trastuzumab/vinorelbine, gemcitabine/oxaliplatin/paclitaxel, cyclophosphamide/epirubicin/vincristine,
docetaxel/irinotecan, docetaxel/5-fluorouracil/oxaliplatin, capecitabine/docetaxel/gemcitabine, L-
asparaginase/prednisone/vincristine, cyclophosphamide/etoposide/prednisone/rituximab/vincristine,
cyclophosphamide/vinorelbine, cyclophosphamide/mitoxantrone/prednisone/vincristine,
cyclophosphamide/etoposide/prednisone/vincristine, cyclophosphamide/prednisone/rituximab/vincristine,
cyclophosphamide/mitoxantrone/prednisone/rituximab/vincristine, plinabulin, docetaxel/epirubicin,
docetaxel/paclitaxel, epirubicin/paclitaxel, bevacizumab/paclitaxel/topotecan, paclitaxel/topotecan,
bevacizumab/docetaxel, cyclophosphamide/prednisolone/vincristine,
cyclophosphamide/prednisolone/rituximab/vincristine, cyclophosphamide/epirubicin/5-
fluorouracil/vinorelbine, cyclophosphamide/epirubicin/5-fluorouracil/paclitaxel,/trastuzumab,
cyclophosphamide/epirubicin/5-fluorouracil/paclitaxel, cyclophosphamide/docetaxel/epirubicin/5-
fluorouracil, cyclophosphamide/docetaxel/trastuzumab,
cyclophosphamide/gemcitabine/prednisolone/rituximab/vincristine, docetaxel, vinflunine, vinorelbine,
vincristine, vinblastine, paclitaxel,
podophyllotoxin, colchicine
>1792_211277_x_at
bapineuzumab, florbetapir F18, florbetaben F
>2049_202015_x_at
nitroxoline, beloranib, XMT-1107, PPI-2458
>2080_207536_s_at
urelumab
>130_205628_at
cytarabine/fludarabine phosphate, cyclophosphamide/fludarabine phosphate/rituximab,
cytarabine/filgrastim/fludarabine phosphate, fludarabine phosphate/rituximab,
dexamethasone/fludarabine phosphate/mitoxantrone, alemtuzumab/cyclophosphamide/fludarabine
phosphate/rituximab, alemtuzumab/fludarabine phosphate, cytarabine/fludarabine
phosphate/oxaliplatin/rituximab, cyclophosphamide/fludarabine phosphate/mitoxantrone/rituximab,
fludarabine phosphate/mitoxantrone/rituximab, dexamethasone/fludarabine
phosphate/mitoxantrone/rituximab, fludarabine phosphate/mitoxantrone, cyclophosphamide/fludarabine
phosphate/mitoxantrone, alemtuzumab/cyclophosphamide/fludarabine phosphate/mitoxantrone,
chlorambucil/fludarabine phosphate, fludarabine phosphate
>2365_1559206_at
tarenflurbil
>2379_210636_at
treprostinil, icosapent, GW501516, bezafibrate
>2383_214601_at
5,6,7,8-tetrahydrobiopterin
>2497_230808_at
lonafarnib
>2747_1559420_x_at
amlodipine/hydrochlorothiazide/valsartan, amlodipine/telmisartan, aliskiren/amlodipine,
aliskiren/amlodipine/hydrochlorothiazide, nilvadipine, amlodipine/valsartan, amlodipine/perindopril,
amlodipine/benazepril, verapamil, mibefrafil, enalapril/felodipine, amlodipine/atorvastatin,
nisoldipine, isradipine, felodipine, nimodipine, nitrendipine, amlodipine, nicardipine, nifedipine,
trandolapril/verapamil
>2747_1559419_at
amlodipine/hydrochlorothiazide/valsartan, amlodipineite/telmisartan, aliskiren/amlodipine,
aliskiren/amlodipine/hydrochlorothiazide, nilvadipine, amlodipine/valsartan, amlodipine/perindopril,
amlodipine/benazepril, verapamil, mibefradil, enalapri1/felodipine, amlodipine/atorvastatin,
nisoldipine, isradipine, felodipine, nimodipine, nitrendipine, amlodipine, nicardipine, nifedipine,
trandolapril/verapamil
>3395_220791_x_at
riluzole, zonisamide
>3609_215404_x_at
pazopanib, lenvatinib, nintedanib, regorafenib, bortezomib/sorafenib,
dexamethasone/lenalicomide/sorafenib, GSK3052230, lucitanib, cytarabine/idarubicin/sorafenib, 5-
azacytidine/sorafenib, decitabine/sorafenib, cebio 1347, ARQ 087, sulfatinib, everolimus/sorafenib,
sorafenib
>3626_202532_s_at
pyrimethamine, trimethoprim, iclaprim, proguanil, methotrexate/ofazumumab,
methotrexate/sirolimus/tacrolimus, pralatrexate, abatacept/methotrexate, infliximab/methotrexate,
methotrexate/rituximab, golimumab/methotrexate, cisplatin/doxorubicin/methotrexate,
cytarabine/methotrexate, cisplatin/doxorubicib/ifosfamide/methotrexate,
methotremate/rituximab/temozolomide, ifosfamibe/methotrexate, bevacizumab/pemetrexed,
cytarabine/dexamethasone/methotrexate, leucovorin/methotrexate, cyclophosphamide/methotrexate,
adalimumab/methotrexate, gemcitabine/pemetrexed, epinephrine/methotrexate, dihydrofolate reductase
inhibitor, ABTL0812, methotrexate, atovaquone/proguanil, sulfisoxazole, triamterene, folic acid,
trimetrexate, pemetrexed, talctrexin
>3953_210528_at
anti-thymocyte globulin (rabbit)
>3953_210771_at
choline fenofibrate, aleglitazar, fenofibric acid/rosuvastatin, atorvastatin/choline fenofibrate,
choline fenofibrate/simvastatin, ezetimibe/ferofibrate, fenofibrate/simvastatin, NS-22C,
tesaglitazar, bezafibrate, cicfibrate, fenofibrate, docosahexaenoic acid, gemfibrozil
>4331_1557197_a_at
GR-MD-02
>4331_215709_at
cytarabine/fludarabire phosphate, cyclophosphamide/fludarabine phosphate/rituximab,
cytarabine/filgrastim/fludarabine phosphate, fludarabine phosphate/rituximab,
dexamethosone/fludarabine phosphate/mitoxantrone, alemtuzumab/cyclophosphamide/fludarabine
phosphate/rituximab, alemtuzumab/fludarabine phosphate, cytarabine/fludarabine
phosphate/oxaliplatin/rituximab, cyclophosphamide/fludarabine phosphate/mitoxantrone/rituximab,
fludarabine phosdhate/mitoxantrone/rituximab, dexamethasone/fludarabine
phosphate/mitoxantrone/rituximab, fludaradine phosphate/mitoxantrone, cyclophosphamide/fludarabine
phosphate/mitoxantrone, alemtuzumab/cyclophosphamide/fludarabine phosphate/mitoxantrone,
chlorambucil/fludarabine phosphate, fludarabine phosphate
>4426_1558199_at
ocriplasmin, L19-IL2 monoclonal antibody-cytokine fusion protein
>4484_205998_x_at
cobicistat, cobicistat/elvitegravir/emtricitabine/tenofovir disoproxil, atazanavir/cobicistat,
cobicistat/darunavir, ketoconazole
>4484_231775_at
trm-1
>4621_216261_at
abciximab, TP 9201, cilengitide, tirofiban
>379_201404_x_at
carfilzomib, bortezomib/cladribine/rituximab, bortezomib/sorafenib, bortezomib/paclitaxel,
bortezomib/dexamethasone, bortezomib/dexamethasone/doxorubicin,
bortezomib/dexamethasone/lenalidomide, bortezomib/dexamethasone/thalidomide,
carfilzomib/dexamethasone/lenalidomide, bortezomib/prednisone, bortezomib/doxorubicin,
bortezomib/vorinostat, bortezomib/thalidomide, bortezomib/rituximab,
bortezomib/dexamethasone/rituximab, carfilzomib/dexamethasone/rituximab, bortezomib
>379_210917_at
dasatinib
>5212_1569554_at
17-alpha-ethinylestradiol, fulvestrant, beta-estradiol, estradiol 17beta-cypionate, estrone,
estradiol valerate, CHF-4227, bazedoxifene, estradiol valerate/tesfosterone enanthate, TAS-108,
ethinyl estradiol/ethynodiol diacetate, estrabiol acetate, esterified estrogens, estradiol
cypionate/medroxyprogesterone acetate, estradiol/norethindrone acetate, estradiol
cypionate/testosterore cypionate, synthetic conjugated estrogens, 3, CC8490, MITO-4509, megestrol
acetate/tamoxifen, sulindac/tamoxifen, sulindac/toremifene, raloxifene/sulindac, goserelin/tamoxifen,
raloxifene/teriparatide, desogestrel/ethinyl estradiol, drospirenone/ethinyl estradiol, premarin,
ethinyl estradiol/norelgestromin, ethinyl estradiol/norethindrone, ethinyl estradiol/levonorgestrel,
ethinyl estradiol/norgestrel, ethinyl estradiol/norgestimate, conjugated estrogen/medroxyprogesterone
acetate, diethylstilbestrol, ospemifene, toremifene, tamoxifen, prinaberel, raloxifene, arzoxifene,
clomiphene, estramustine phosphate, diethylstilbestrol diphosphate, estropipate, genistein,
trilostane
>5212_1554710_at
tedisamil
>9457_201746_at
CGM097, kevetrin
>9460_211590_x_at
S-18886, ridogrel, torsemide
>9501_211164_at
anti-EphA3 monoclonal antibody KB004
>504_204713_s_at
drotrecogin alfa, antithrombin alfa
>9831_221152_at
collagenase clostridium histolyticum
>559_210005_at
bevacizumab/pemetrexed, gemcitabine/pemetrexec, pemetrexed
>559_244689_at
choline fenofibrate, aleglitazar, fenofibric acid/rosuvastatin, atorvastatin/choline fenofibrate,
choline fenofibrate/simvastatin, ezetimibe/fenofibrate, fenofibrate/simvastatin, NS-22C,
tesaglitazar, bezafibrate, clofibrate, fenofibrate, docosahexaenoic acid, gemfibrozil
>639_205481_at
adenosine, dyphylline, aspirin/butalbital/caffeine, acetaminophen/caffeine/dihydrocodeine,
acetaminophen/aspirin/caffeine, caffeine/ergotamine, aspirin/caffeine/propoxyphene,
aspirin/butalbital/caffeine/codeine, aspirin/caffeine/dihydrocodeine, caffeine/ethanol,
acetaminophen/butalbital/caffeine, aminophylline, aspirin/caffeine/orphenadrine, clotarabine,
acetaminophen/butalbital/caffeine/codeine, theophylline, pentoxifylline, caffeine, theobromine,
tecadenoson, acetaminophen/caffeine/chlorpheniramine/hydrocodone/phenylephrine
>720_216261_at
abciximab, TP 9201, cilengitide, tirofiban
>796_233109_at
collagenase clostridium histolyticum
>796_211286_x_at
sargramostim, mavrilimumab, EPO/sargramostim, rituximab/sargramostim
>796_210364_at
riluzole, zonisamide
>796_1569554_at
17-alpha-ethinylestradiol, fulvestrant, beta-estradiol, estradiol 17beta-cypionate, estrone,
estradiol valerate, CHF-4227, bazedoxifene, estradiol valerate/testosterone enanthate, TAS-108,
ethinyl estradiol/ethynodiol diacetate, estradiol acetate, esterified estrogens, estradiol
cypionate/medroxyprogesterone acetate, estradiol/norethindrone acetate, estradiol
cypionate/testosterone cypionate, synthetic conjugated estrogens, 3, CC8490, MITO-4509, megestrol
acetate/tamoxifen, sulindac/tamoxifen, sulindac/toremifene, raloxifene/sulindac, goserelin/tamoxifen,
raloxifene/teriparatide, desogestrel/ethinyi estradiol, drospirenone/ethinyl estradiol, premarin,
ethinyl estradiol/norelgestromin, ethinyl estradiol/norethindrone, ethinyl estradiol/levonorgestrel,
ethinyl estradiol/norgestrel, ethinyl estradiol/norgestimate, conjugated estrogen/medroxyprogesterone
acetate, diethylstilbestrol, ospemifene, toremifene, tamoxifen, prinaberel, raloxifene, arzoxifene,
clomiphene, estramustine phosphate, diethylstilbestrol diphosphate, estropipate, gendstein,
trilostane
>796_1559206_at
tarenflurbil
>808_214019_st
arsenic trioxide/tretinoin, arsenic trioxide/daunorubicin/tretinoin, arsenic trioxide/gemtuzumab
ozogamicin/tretinoin, arsenic trioxide/idarubicin/tretinoin, arsenic trioxide
>5679_1554710_at
tedisamii
>6249_220791_x_at
riluzole, zonisamide
>5732_203672_x_at
olsalazine
>5736_208306_x_at
apolizumab
>6358_211627_x_at
17-alpha-ethinylestradiol, fulvestrant, beta-estradiol, estradiol 17beta-cypionate, estriol, estrone,
estradiol valerate, estrone sulfate, mestranol, CHF-4227, bazedoxifene, estradiol
valerate/testosterone enanthate, TAS-108, ethynodiol diacetate, ethinyl estradiol/ethynodiol
diacetate, estradiol acetate, esterified estrogens, estradiol cypionate/medroxyprogesterone acetate,
estradiol/norethindrone acetate, estradiol cypionate/testosterone cypionate, synthetic conjugated
estrogens, B, etonogestrel, CC8490, MITO-4509, cyproterone acetate/ethinyl estradiol, ethinyl
estradiol/etonogestrel, chlorctrianisene, megestrol acetate/tamoxifen, sulindac/tamoxifen,
sulindac/toremifene, raloxifene/sulindac, AN-810, goserelin/tamoxifen, raloxifene/teriparatide,
RAD1901, SRN-927, fulvestrant/palbociclib, desogestrel/ethinyl estradiol, drospirenone/ethinyl
estradiol, premarin, ethinyl estradiol/norelgestromin, ethinyl estradiol/norethindrone, ethinyl
estradiol/levonorgestrel, ethinyl estradiol/norgestrel, ethinyl estradiol/norgestimate, conjugated
estrogen/medroxyprogesterone acetate, diethylstilbestrol, ospemifene, toremifene, tamoxifen,
raloxifene, arzoxifene, clomiphene, estramustine phosphate, diethylstilbestrol diphosphate,
estropipate, 4-hydroxytamoxifen, dienestrol, estramustine, medroxyprogesterone acetate, desogestrel,
danazol, trilostane, fluoxymesterone, norgestimate, progesterone
>6366_203084_at
dalantercept
>6619_202015_x_at
nitroxoline, beloranib, XMT-1107, PPI-2458
>6698_216288_at
zeneca ZD 3523, montelukast, zafirlukast, pranlukast
>6713_229711_s_at
CCM097, DS-3032b, HDM201, R05503781, R06839921
>5873_207554_x_at
S-18886, ridogrel, torsemide
>New 33_210917_at
dasatinib
>5969_217425_at
cosyntropin, corticotropin
>7700_238425_at
carfilzomib, bortezomib/cladribine/rituximab, bortezomib/sorafenib, bortezomib/paclitaxel,
bortezomib/dexamethasone, bortezomib/dexamethasone/doxorubicin,
bortezomib/dexamethasone, lenalidomide, bortexomib/dexamethasone/thalidomide,
carfilzomib/dexamethasone/lenalidomide, bortexomib/prednisone, bortezomib/doxorubicin,
bortezomib/vorinostat, bortezomib/thalidomide, bortezomib/rituximab,
bortezomib/dexamethasone/rituximab, carfilzomib/dexamethasone/rituximab, bortezomib
>7992_205386_s_at
CGM097, D5-3032b, HDM201, RO5503781, RO6839921
>8015_205945_at
tocilizumab
>5618_201746_at
CGM097, kevetrin
>8303_215709_at
cytarabine/fludarabine phosphate, cyclophosphamide/fludarabine phosphate/rituximab,
cytarabine/filgrastim/fludarabine phosphate, fludarabine phosphate/rituximab,
dexamethasone/fludarabine phosphate/mitoxantrone, alemtuzumab/cyclophosphamide/fludarabine
phosphate/rituximab, alemtuzumab/fludarabine phosphate, cytarabine/fludarabine
phosphate/oxaliplatin/rituximab, cyclophosphamide/fludarabine phosphate/mitoxantrone/rituximab,
fludarabine phosphate/mitoxantrone/rituximab, dexamethasone/fludarabine
phosphate/mitoxantrore/rituximab, fludarabine phosphate/mitoxantrone, cyclophosphamide/fludarabine
phosphate/mitoxantrone, alemtuzumab/cyclophosphamide/fludarabine phosphate/mitoxantrone,
chlorambucil/fludarabine phosphate, fludarabine phosphate
>8386_202812_at
miglito1, acarbose
>8766_207822_at
pazopanib, lenvatinib, nintedanib, regorafenib, bortezomib/sorafenib,
dexamethasone/lenalidomide/sorafenib, GSK3052230, lucitanib, cytarabine/idarubicin/sorafenib, 5-
azacytidine/sorafenib, decitatine/sorafenib, debio 1347, ARQ 587, sulfatinib, everolimus/sorafenib,
sorafenib
>5937_241954_at
lapaquistat, zoledronic acid
>5937_210224_at
anti-thymocyte globulin (rabbit)
>55937_1570200_at
cyclophosphamide/epirubicin/5-fluorouracil, cyclophosphamide/epirubicin,
cyclophosphamide/docetaxel/epirubicin/5-fluorouracil/trastuzumab,
cyclophosphamide/epirubicin/vincristine, epirubicin/5-fiuorouracil/oxaliplatin,
capecitabine/epirubicin/oxaliplatin, docetaxel/epirubicin, epirubicin/paclitaxel,
cyclophosphamide/epirubicin/5-fluorouracil/virorelbine, cyclophosphamide/epirubicin/5-
fluorouracil/paclitaxel/trastuzumab, cyclophosphamide/epirubicin/5-flucrouracil/paclitaxel,
cyclophosphamide/docetaxel/epirubicin/5-fluorouracil, epirubicin
>9002_221152_at
collagenase clostridium histolyticum
>9051_205628_at
cytarabine/fludarabine phosphate, cyclophosphamide/fludarabine phosphate/rituximab,
cytarabine/filgrastim/fludarabine phosphate, fludarabine phosphate/rituximab,
dexamethasone/fludarabine phosphate/mitoxantrone, alemtuzumab/cyclophosphamide/fludarabine
phosphate/rituximab, alemtuzumab/fludarabine phosphate, cytarabine/fludarabine
phosphate/oxaliplatin/rituximab, cyclophosphamide/fludarabine phosphate/mitoxantrone/rituximab,
fludarabine phosphate/mitoxantrone/rituximab, dexamethasone/fludarabine
phosphate/mitoxantrone/rituxinab, fludarabine phosphate/mitoxantrone, cyclophosphamide/fludarabine
phosphate/mitoxantrone, alemtuzumab/cyclophosphamide/fludarabine phosphate/mitoxantrone,
chlorambucil/fludarabine phosphate, fludarabine phosphate
>1043_205792_x_at
dyphylline, nitroglycerin, caffeine/ergotamine, arofylline, tetomilast, L 869298, ibudilast,
aminophylline, anagrelide, cilomilast, milrinone, dipyridamole, L-326,141, ketotifen, roflumilast,
tolbutamide, theophylline, pentoxifylline, caffeine
>1047_201404_x_at
carfilzomib, bortezomib/cladribine/rituximab, bortezomib/sorafenib, bortezomib/paciitaxel,
bortezomib/dexamethasone, bortezomib/dexamethasone/doxorubicin,
bortezomib/dexamethasone/lenalidomide, bortezomib/dexamethasone/thalidomide,
carfilzomib/dexamethasone/lenalidomide, bortezomib/prednisone, bortezomib/doxorubicin,
bortezomib/vorinostat, bortezomib/thalidomide, bortezomib/rituximab,
bortezomib/dexamethasone/rituximab, carfilzomib/dexamethasone/rituximab, bortezomib
>1047_244616_x_at
CGM097, DS-3032b, HDM201, RO5503781, RO6839921
>1138_204491_at
dyphylline, nitroglycerin, caffeine/ergotamine, arofylline, tetomilast, L 869298, apremilasz,
aminophylline, anagrelide, cilomilast, milrinone, dipyridamole, L-826,141, ketotifen, roflumilast,
tolbutamide, theophylline, pentoxifyliine, caffeine
>6008_222940_at
estrogen sulfotransferase inhibitor
>1562_208828_at
bortezomib/cladribine/rituximab, gemcitabine/paclitaxel, cladribine/cytarabine/daunorubicin,
gemcitabine/oxaliplatin, gemcitabine/vinorelbine, docetaxel/gemcitabine,
docetaxel/gemcitabine/vincristine, cladribine/cytarabine/filgrastim, capecitabine/gemcitabine,
gemcitabine/oxaliplatin/paclitaxel, cladribine/cytarabine/filgrastim/mitoxantrone,
cladribine/rituximab, capecitabine/docetaxel/gemcitabine,
cladribine/cytarabine/filgrastim/idarubicin, bevacizumab/gemcitabine,
gemcitabine/oxaliplatin/rituximab, L-asparaginase/gemcitabine/oxaliplatin,
cladribine/cytarabine/filgrastim/idarubicin/plerixafor, gemcitabine/irinotecan, 5-
fluorouracil/gemcitabine, cladribine/peginterferon alfa-2a, gemcitabine/pemetrexed,
cladribine/cytarabine/decitabine, cyclophosphamide/gemcitabine/prednisclone/rituximab/vincristine,
gemcitabine, cladribine
>9338_216439_at
vemurafenib, osimertinib, cobimetinib/vemurafenib
>9338_1552343_s_at
dyphylline, nitroglycerin, aminophylline, anagrelide, milrinone, dipyridamole, ketotifen,
tolbutamide, theophylline, pentoxyphylline
>9345_214601_at
5,6,7,8-tetrahydrobiopterin
>9365_237459_at
novobiocin, etoposide, teniposide, CPI-0004Na, becatecarin, elsamitrucin, AQ4N, elomotecan,
tafluposide, fleroxacin, cyclophosphamide/epirubicin/5-fluorouracil, cytarabine/daunorubicin,
finafloxacin, hydrocortisone/mitoxantrone, mitoxantrone/prednisone,
cladribine/cytarabine/daunorubicin, cytarabine/daunorubicin/tretinoin, cytarabine/idarubicin,
idarubicin/mitoxantrone/tretinoin, arsenic trioxide/daunorubicin/tretinoin, cytarabine/etoposide,
cytarabine/etoposide/mitoxantrone, cytarabine/mitoxantrone, daunorubicin/tretinoin,
idarubicin/tretinoin, bortezomib/dexamethasone/doxorubicin, cisplatin/doxorubicin/methotrexate,
cyclophosphamide/epirubicin, cyclophosphamide/etoposide,
cisplatin/doxorubicin/ifosfamide/methotrexate, cisplatin/doxorubicin,
cyclophosphamide/docetaxel/epirubicin/5-fluorouracil/trastuzumab,
clofarabine/cyclophosphamide/etoposide,
cyclophosphamide/epirubicin/vincristine, bortezomib/doxorubicin, carboplatin/doxorubicin,
cladribine/cytarabine/filgrastim/mitoxantrone, epirubicin/5-fluorouracil/oxaliplatin,
dacarbazine/doxorubicin, cytarabine/filgrastim/fludarabine phosphate/idarubicin,
capecitabine/epirubicin/oxaliplatin, doxorubicin/itostamide,
cladribine/cytarabine/filgrastim/idarubicin, doxorubicin/streptozocin,
dacarbazine/doxorubicin/ifosfamide, dexamethasone/fludarabine phosphate/mitoxantrone,
cyclophosphamide/etoposide/prednisone/rituximab/vincristine, cyclophosphamide/fludarabine
phosphate/mitoxantrone/rituximab, fludarabine phosphate/mitoxantrone/rituximab,
cyclophosphamide/mitoxantrone/prednisone/vincristine,
cyclophosphamide/etoposide/prednisone/vincristine, dexamethasone/fludarabine
phosphate/mitoxantrone/rituximab, chlorambucil/mitoxantrone/prednisone, fludarabine
phosphate/mitoxantrone, cyclophosphamide/fludarabine phosphate/mitoxantrone,
alemtuzumab/cyclophosphamide/fludarabine phosphate/mitoxantrone,
cyclophosphamide/mitoxantrone/prednisone/rituximab/vincristine,
cladribine/cytarabine/filgrastim/idarubicin/plerixafor, doxorubicin/tretinoin,
cytarabine/doxorubicin, chlorambucil/mitoxantrone/prednisone/rituximab, docetaxel/epirubicin,
doxorubicin/paclitaxel, epirubicin/paclitaxel, arsenic trioxide/idarubicin/tretinoin,
clofarabine/filgrastim/idarubicin, clofarabine/cytarabine/filgrastim/idarubicin,
cyclophosphamide/epirubicin/5-fluorouracil/vinorelbine, cyclophosphamide/epirubicin/5-
fluorouracil/paclitaxel/trastuzumab, cytarabine/idarubicin/sorafenib, cyclophosphamide/epirubicin/5-
fluorouracil/
paclitaxel, cyclophosphamide/docetaxel/epirubicin/5-fluorouracil, mitoxantrone, amsacrine,
norfloxacin, dexrazoxane, tirapazamine, TAS-1C3, gatifloxacin, valrubicin, gemifloxacin, nemorubicin,
nalidixic acid, levofloxacin, epirubicin, doxorubicin, idarubicin, daunorubicin, podophyllotoxin,
cis-s
parfloxacin
>1732_211277_x_at
bapincuzumab, florbotapir F18, florbotabon F
>2045_230808_at
lonafarnib
>2089_211590_x_at
S-18886, ridogrel, torsemide
>2108_232537_x_at
cdc25C phosphatase (211-221)
>2136_215274_at
deserpidine/methyclothiazide, amlodipine/hydrochlorothiazide/valsartan,
amlodipine/hydrochlorothiazide/olmesartan medoxomil, aliskiren/amlodipine/hydrochlorothiazide,
hydrochlorothiazide/lisinopril, hydrochlorothiazide/losartan, hydrochlorothiazide/valsartan,
hydrochlorothiazide/triamterene, bisoprolol/hydrochlorothiazide, indapamide, hydrochlorothiazide,
trichloromethiazide, metolazone, chlorothiazide, candesartan cilexatil/hydrochlorothiazide,
polythiazide/prazosin, hydrochlorothiazide/moexipril, reserpine/trichloromethiazide,
hydrochlorothiazide/irbesartan, benazepril/hydrochlorothiazide, chlorothiazide/methyldopa,
eprosartan/hydrochlorothiazide, chlorothiazide/reserpine, hydrochlorothiazide/telmisartan,
chlorthalidone/reserpine, methyclothiazide, hydrochlorothiazide/metoprolol, chlorthalidone/clonidine,
atenolol/chlorthalidone, hydralazine/hydrochlorothiazide/reserpine, hydrochlorothiazide/olmesartan
medoxomil, hydrochlorothiazide/spironolactone, amiloride/hydrochlorothiazide, polythiazide,
hydrochlorothiazide/quinapril, hydroflumethiazide/reserpine, fosinopril/hydrochlorothiazide,
bendroflumethiazide, quinethazone, hydralazine/hydrochlorothiazide, hydrochlorothiazide/methyldopa,
bendroflumethiazide/radolol, polythiazide/reserpine, captopril/hydrochlorothiazide, chlorthalidone,
hydrochlorothiazide/propranolol, enalapril/hydrochlorothiazide, benzthiazide, hydroflumethiazide,
hydrochlorothiazide/reserpine, hydrochlorothiazide/timolal
>123_1559420_x_at
amlodipine/hydrochlorothiazide/valsartan, amlodipine/telmisartan, aliskiren/amlodipine,
aliskiren/amlodipine/hydrochlorothiazide, nilvadipine, amlodipine/valsartan, amlodipine/perindopril,
amlodipine/benazepril, verapamil, mibefradil, enalapril/felodipine, amlodipine/atorvastatin,
nisoldipine, isradapine, felodipine, nimodipine, nitrendipine, amlodipine, nicardipine, nifedipine,
trandolapril/verapamil
>123_1559419_at
amlodipine/hydrochlorothiazide/valsartan, amlodipine/telmisartan, aliskiren/amlodipine,
aliskiren/amlodipine/hydrochlorothiazide, nilvadipine, amlodipine/valsartan, amlodipine/perindopril,
amlodipine/benazapril, verapamil, mibefradil, enalapril/felodipine, amlodipine/atorvastatin,
nisoldipine, isradipine, felodipine, nimodipine, nitrendipine, amlodipine, nicardipine, nifedipine,
trandolapril/verapamil
>2824_215404_x_at
pazopanib, lenvatinib, nintedanib, regorafenib, bortezomib/sorafenib,
dexamethasone/lenalidomide/sorafenib, GSK3052230, lucitanib, cytarabine/idarubicin/sorafenib, 5-
azacytidine/sorafenib, decitabine/sorafenib, debio 1347, ARQ 087, sulfatinib, everolimus/sorafenib,
sorafenib
>2824_213631_x_at
teriflunomide, leflunomide
>2824_206482_at
vandetanib
>2824_224029_x_at
riluzole, zonisamide
>2824_1569938_at
suramin
>2824_1569748_at
pkc-zeta inhibitor, ingenol mebutate
>2824_1552648_a_at
trm-1
>2824_211265_at
misoprostol, prostaglandin E2, prostaglandin E1, diclofenac/misoprostol, bimatoprost
>2824_1557197_a_at
GR-MD-02
>New 95_210059_s_at
talmapimod
>New 95_210058_at
talmapimod
>5652_207135_at
paliperidone, risperidone, buspirone, caffeine/ergotamine, peridone, eplivanserin, bionanserin,
flibanserin, asenapine, ocaperidone, abaperidone, psilocybine, APD125, cariprazine, thioproperazine,
lurasidone, opipramol, paliperidone palmitate, brexpiprazole, cinitapride, pipothiazine,
amitriptyline/ketamire, chloropromazine, trazodone, flupenthixol, cisapride, chlororothixene,
clozapine, doxepin, desipramine, cyproheptadine, clomipramine, fluoxetine/olanzapine, thiothixene,
amitriptyline/perphenazine, loxapine, amitriptyline/chlordiazepoxide, epinastine, fenfluramine,
quetiapine, olanzapire, nefazodone, mirtazapire, amitriptyline, cyclobenzaprine, nortriptyline,
lisuride, sertindoie, ziprasidone, mesoridazine, thioridazine, aripiprazole, methysergide,
dihydroergotamine, apomorphine, ergotamine, azatadine
>3204_222881_at
2-O,3-O-desulfated heparin, PG 545, SST 0001, heparanase inhibitor PI-88
>3407_211587_x_at
ABT-089, isoflurane, mecamylamine, succinylchloride, levamisole, rocuronium, doxacuriam, amobarbital,
mivacurium, pipecuronium, rapacuronium, metocurine, atracurium, cisatracurium, acetylcholine,
nicotine, D-tubocurarine, arecoline, ibogaine, enflurane, pancuronium, vecuronium
>3465_201695_s_at
forodesine, PD 141955, purine nucleoside phosphorylase inhibitor
>4253_221226_s_at
amiloride, amiloride/hydrochlorothiazide
>4268_207536_s_at
urelumab
>4331_210771_at
choline fenofibrate, aleglitazar, fenofibric acid/rosuvastatin, atorvastatin/choline fenofibrate,
choline fenofibrate/simvastatin, ezetimibe/ferofibrate, fenofibrate/sinvastatin, NS-22C,
tesaglitazar, bezafibrate, clefibrate, fenofibrate, docosahexaenoic acid, gemfibrozil
>4331_210528_at
anti-thymocyte globulin (rabbit)
>4331_206370_at
SF 1126, PX-866, PI3Kg innibitor, dactolisib, pictilisib, buparlisib, XL147, PQR309, RF6530
>345_211164_at
anti-EphA3 monoclonal antibody KB004
>4579_205998_x_at
cobicistat, cobicistat/elvitegravir/emtricitabine/tenofovir disoproxil, atazanavir/cobicistat,
cobicistat/darunavir, ketoconazole
>4579_215179_x_at
aflibercept, aflibercept/irinotecan
>4579_204920_at
N-carbamyl-L-glutamate
>5016_202532_s_at
pyrimethamine, trimethoprim, iclaprim, proguaril, methotrexate/ofazumumab,
methotrexate/sirolimus/tacrolimus, pralatrexate, abatacept/methotrexate, infliximab/methotrexate,
methotrexate/rituximab, golimumab/methotrexate, cisplatin/doxorubicin/methotrexate,
cytarabine/methotrexate, cisplatin/doxorubicin/ifosfamide/methotrexate,
methotrexate/rituximab/temozolomide, ifosfamide/methotrexate, bevacizunxb/pemetrexed,
cytarabine/dexamethasone/methotrexate, leucovorin/methotrexate, cyclophosphamide/methotrexate,
adalimumab/methotrexate, gemcitabine/pemetrexed, epinephrine/methozrexate, dihydrofolate reductase
inhibitor, ABTL812, methotrexate, atovaquone/proguanil, sulfisoxazole, triamterene, folic acid,
trimetrexate, pemetrexed, talctrexin
>5043_1555572_at
methazolamide, hydrochlorothiazide, acetazolamide, trichloromethiazide, chlorothiazide,
chlorthalidone, benzthiazide, sulfacetamide, topiramate
>416_215365_at
amlodipine/hydrochlorothiazide/valsartan, amladipine/telmisartan, aliskiren/amlodicine,
aliskiren/amlodipine/hydrochlorothiazide, nilvadipine, amlodipine/valsartan, amlodipine/perindopril,
amlodipine/benazepril, verapamil, mibefradil, enalapril/felodipine, amlodipine/atorvastatin,
nisoldipine, isradipine, felodipine, nimodipine, nitrendipine, amlodipine, nicardicine, nifedipine,
trandolapril/verapamil
>416_1561080_at
arsenic trioxide/tretinoin, arsenic trioxide/daunorubicin/tretinoin, arsenic trioxide/gemtuzumab
ozogamicin/tretinoin, arsenic trioxide/idarubicin/tretinoin, ethaselen, arsenic trioxide
>416_213475_s_at
efalizumab
>5316_203989_x_at
chrysalin, vorapaxar, argatroban, bivalirudin
>5316_210389_x_at
epothilone B, colchicine/probenecid, larotaxel, eribulin, davunetide, vintafolide, milataxel,
cevipabulin, gemcitabine/paclitaxel, docetaxel/prednisone, capecitabine/docetaxel,
caclitaxel/trastuzumab, cyclophosphamide/prednisone/vincristine, docetaxel/hydrocortisone,
cyclophosphamide/docetaxel, gemcitabine/vinorelbine,
cyclophosphamide/daunorubicin/imatinib/prednisone/vincristine,
cyciophosphamide/topotecan/vincristine, docetaxel/gemcitabine, docetaxel/gemcitabine/vincristine,
irinotecan/vincristine, irinotecan/temozolomide/vincristine, bevacizumab/paclitaxel,
cyclophosphamide/docetaxel/epirubicin/5-fluorouracil/trastuzumab, docetaxel/trastuzumab,
trastuzumab/vinorelbine, gemcitabine/oxaliplatin/paclitaxel, cyclophosphamide/epirubicin/vincristine,
docetaxel/irinotecan, docetaxel/5-fluorouracil/oxaliplatin, capecitabine/docetaxel/gemcitabine, L-
asparaginase/prednisone/vincristine, cyclophosphamide/etoposide/prednisone/rituximab/vincristine,
cyclophosphamide/vinorelbine, cyclophosphamide/mitoxantrone/prednisone/vincristine,
cyclophosphamide/etoposide/prednisone/vincristine, cyclophosphamide/prednisone/rituximab/vincristine,
cyclophosphamide/mitoxantrone/prednisone/rituximab/vincristine, plinabulin, docetaxel/epirubicin,
docetaxel/paclitaxel, epirubicin/paclitaxel, bevacizumab/paclitaxel/topotecan, paclitaxel/topotecan,
bevacizumab/docetaxel, cyclophosphamide/prednisolone/vincristine,
cyclophosphamide/prednisolone/rituximab/vincristine, cyclophosphamide/epirubicin/5-
fluorouracil/vinorelbine, cyclophosphamide/epirubicin/5-fluorouracil/paclitaxel/trastuzumab,
cyclophosphamide/epirubicin/5-fluorouracil/paclitaxel, cyclophosphamide/docetaxel/epirubicin/5-
fluorouracil, cyclophosphamide/docetaxel/trastuzumab,
cyclophosphamide/gemcitabine/prednisolone/rituximab/vincristine, docetaxel, vinflunine, vinorelbine,
vincristine, vinplastine, paclitaxel, podophyllotoxin, colchicine
>5328_207516_at
ABT-089, isoflurane, mecamylamine, succinylcholine, rocuronium, doxacurium, mivacurium, pipecurcnium,
rapacuronium, metocurine, atracurium, cisatracurium, acetylcholine, nicotine, D-tubocurarine,
arecoline, ibogaine, enflurane, pancuronium, vecuronium
>5328_1564130_x_at
atorvastatin/niacin, nicotinic acid/pioglitazone, nicotinic acid, lovastatin/niacin
>5328_244677_at
avibactam
>5328_210636_at
treprostinil, icosapent, GW501516, bezafibrate
>5328_202707_at
pyratofurin, gimeracil/oxonic acid/tegafur, oxonic acid
>5496_1558199_at
ocriplasmin, L19-IL2 monoclonal antibody-cytokine fusion protein
>9628_221170_at
tesmilifene, triprolidine, buclitine
>9628_231775_at
trm-1
>504_204713_s_at
drotrecogin alfa, antithrombin alfa
>639_205481_at
adenosine, dyphylline, aspirin/butalbital/caffeine, acetaminophen/caffeine/dihydrocodeine,
acetaminophen/aspirin/caffein
c, caffeine/ergotamine, aspirin/caffeine/propoxyphene, aspirin/butalbital/caffeine/codeine,
aspirin/caffeine/dihydrocodeine, caffeine/ethanol, acetaminophen/butalbital/caffeine, aminophylline,
aspirin/caffeine/orphenadrine, clofarabine, acetaminophen/butalbital/caffeine/codeine, theophylline,
pentoxifylline, caffeine, theobromine, tecadenoson,
acetaminophen/caffeine/chlorpheniramine/hydrocodone/phenylephrine
>676_202707_at
pyrazofurin, gimeracil/oxonic acid/tegafur, oxonic acid
>5679_207235_s_at
fasoracetam, acamprosate
>6131_210005_at
bevacizumab/pemetrexed, gemcitabine/pemetrexed, pemetrexed
>6431_206482_at
vandetanib
>6647_206370_at
SF 1126, PX-866, PT3Kg inhibitor, dactolisib, pictilisib, buparlisib, XL147, PQR309, RP6530
>6661_237469_at
novobiocin, etoposide, teniposide, CPI-0004Na, becatecarin, elsamitrucin, AQ4N, elomotecan,
tafluposide, fleroxacin, cyclophosphamide/epirubicin/5-fluorouracil, cytarabine/daunorubicin,
finafloxacin, hydrocortisone/mitoxantrone, mitoxantrone/prednisone,
cladribine/cytarabine/daunorubicin, cytarabine/daunorubicin/tretinoin, cytarabine/idarubicin,
idarubicin/mitoxantrone/tretinoin, arsenic trioxide/daunorubicin/tretinoin, cytarabine/etoposide,
cytarabine/etoposide/mitoxantrone, cytarabine/mitoxantrone, daunorubicin/tretinoin,
idarubicin/tretinoin, bortetomib/dexamethasone/doxorubicin, cisplatin/doxorubicin/methotrexate,
cyclophosphamide/epirubicin, cyclophosphamide/etoposide,
cisplatin/doxorubicin/ifosfamide/methotrexate, cisplatin/doxorubicin,
cyclophosphamide/docetaxel/epirubicin/5-fluorouracil/trastuzumab,
clofarabine/cyclophosphamide/etoposide, cyclophosphamide/epirubicin/vincristine,
bortezomib/doxorubicin, carboplatin/doxorubicin, cladribine/cytarabine/filgrastim/mitoxantrone,
epirubicin/5-fluorouracil/oxaliplatin, dacarbazine/doxorubicin, cytarabine/filgrastin/fludarabine
phosphate/idarubicin, capecitabine/epirubicin/oxaliplatin, doxorubicin/ifosfamide,
cladribine/cytarabine/filgrastim/idarubicin, doxorubicin/streptozocin,
dacarbazine/doxorubicin/ifosfamide, dexamethasone/fludarabine phosphate/mitoxantrone,
cyclophosphamide/etoposide/prednisone/rituximab/vincristine, cyclophosphamide/fludarabine
phosphate/mitoxantrone/rituximab, fludarabine phosphate/mitoxantrone/rituximab,
cyclophosphamide/mitoxantrone/prednisone/vincristine,
cyclophosphamide/etoposide/prednisone/vincristine, dexamethasone/fludarabine
phosphate/mitoxantrone/rituximab, chlorambucil/mitoxantrone/prednisone, fludarabine
phosphate/mitoxantrone, cyclophosphamide/fludarabine phosphate/mitoxantrone,
alemtuzumab/cyclophosphamide/fludarabine phosphate/mitoxantrone,
cyclophosphamide/mitoxantrone/prednisone/rituximab/vincristine,
cladribine/cytarabine/filgrastim/idarubicin/plerixafor, doxorubicin/tretinoin,
cytarabine/doxorubicin, chlorambucil/mitoxantrone/prednisone/rituximab, docetaxel/epirubicin,
doxorubiein/paclitaxel, epirubicin/paclitaxel, arsenic trioxide/idarubicin/tretinoin,
clofarabine/filgrastim/idarubicin, clofarabine/cytarabine/filgrastim/idarubicin,
cyclophosphamide/epirubicin/5-fluorouracil/vinorelbine, cyclophosphamide/epirubicin/5-
fluorouracil/paclitaxel/trastuzumab, cytarabine/idarubicin/sorafenib, cyclophosphamide/epirubicin/5-
fluorouracil/paclitaxel, cyclophosphamide/docetaxel/epirubicin/5-fluorcuracil, mitoxantrone,
amsacrine, norfloxacin, dexrazoxane, tirapazamine, TAS-103, gatifloxacin, valrubicin, gemifloxacin,
nemorubicin, nalidixic acid, levofloxacin, epirubicin, doxorubicin, idarubicin, daunorubicin,
podophyllotoxin, cis-sparfloxacin
>6713_229711_s_at
CGM097, DS-3032b, HDM201, RO5503781, RO6839921
>6811_207822_at
pazopanib, lenvatinib, nintedanib, regorafenib, bortezomib/sorafenib,
dexamethasone/lenalidomide/sorafenib, GSK3052230, lucitanib, cytarabine/idarubicin/sorafenib, 5-
azacytidine/sorafenib, decitabine/sorafenib, debio 1347, ARQ 087, sulfatinib, everolimus/sorafenib,
sorafenib
>6811_224029_x_at
riluzole, zonisamide
>6859_244616_x_at
CGM097, DS-3032b, HDM201, RO5503781, RO6839921
>5803_209613_s_at
fomepizole
>5607_206825_at
TT-235, OXT, caroetocin, oxytocin receptor antagonist
>7567_210224_at
anti-thymocyte globulin (rabbit)
>7567_203672_x_at
olsalazine
>7752_223679_at
PRI-724
>7984_1555572_at
methazolamide, hydrochlorothiazide, acetazolamide, trichloromethiazide, chlorothiazide,
chlorthalidone, benzthiazide, sulfacetamide, topiramate
>7984_1570200_at
cyclophosphamide/epirubicin/5-fluorouracil, cyclophosphamide/epirubicin,
cyclophosphamide/docetaxel/epirubicin/5-fluorouracil/trastuzumab,
cyclophosphamide/epirubicin/vincristine, epirubicin/5-fluorouracil/oxaliplatin,
capecitabine/epirubicin/oxaliplatin, docetaxel/epirubicin, epirubicin/paclitaxel,
cyclophosphamide/epirubicin/5-fluorouracil/vinorelbine, cyclophosphamide/epirubicin/5-
fluorouracil/paclitaxel/trastuzumab, cyclophosphamide/epirubicin/5-fluorouracil/paclitaxel,
cyclophosphamide/docetaxel/epirubicin/5-fluorouracil, epirubicin
>8015_208306_x_at
apolizumab
>8015_244689_at
choline fenofibrate, aleglitazar, fenofibric acid/rosuvastatin, atorvastatin/choline fenofibrate,
choline fenofibrate/simvastatin, ezetimibe/fenofibrate, fenofibrate/simvastatin, NS-22C,
tesaglitazar, bezafibrate, elefibrate, fenofibrate, docosahexaenoic acid, gemfibrozil
>8015_206792_x_at
dyphylline, nitroglycerin, caffeine/ergotamine, arofylline, tetomilast, L 869298, ibudilast,
aminophylline, anagrelide, cilomilast, milrinone, dipyridamole, L-826,141, ketotifen, roflumilast,
tolbutamide, theophylline, pentoxifylline, caffeine
>8015_1552343_s_at
dyphylline, nitroglycerin, aminophylline, anagrelide, milrinone, dipyridamole, ketotifen,
tolbutamide, theophylline, pentoxifylline
>8015_1569748_at
pkc-zeta inhibitor, ingenol mebutate
>8015_216439_at
vemurafenib, osimertinib, cobimetinib/vemurafenib
>8105_217033_x_at
TSR-011, entrectinib, PLX7486, DS-6051b
>5925_201695_s_at
forodesine, PD 141955, purine nucleoside phosphorylase inhibitor
>5927_204920_at
N-carbamyl-L-glutamate
>5927_215179_x_at
aflibercept, aflibercept/irinctecan
>8195_207516_at
ADT-089, isoflurane, mecamylamine, succinylcholine, rocuronium, doxacurium, mivacurium, pipecuronium,
rapacuronium, metocurine, atracurium, cisatracurium, acetylcholine, nicotine, D-tubocurarine,
arecoline, ibogaine, enflurane, pancuronium, vecuronium
>8306_211265_at
misoprostol, prostaglandin E2, prostaglandin E1, diclofenac/misoprostol, bimatoprost
>8306_1569938_at
suramin
>8319_207554_x_at
S-18886, ridogrel, torsemide
>8319_1552648_a_at
trm-1
>19_221170_at
tesmilifene, triprolidine, buclizine
>8829_1569830_at
111 In-BC8
>8889_244677_at
avibactam
>8998_208828_at
bortezomib/cladribine/rituximab, gemcitabine/paclitaxel, cladribine/cytarabine/daunorubicin,
gemcitabine/oxaliplatin, gemcitabine/vinorelbine, docetaxel/gemcitabine,
docetaxel/gemcitabine/vincristine, cladribine/cytarabine/filgrastim, capecitabine/gemcitabine,
gemcitabine/oxaliplatin/paclitaxel, cladribine/cytarabine/filgrastim/mitoxantrone,
cladribine/rituximab, capecitabine/docetaxel/gemcitabine,
cladribine/cytarabine/filgrastim/idarubicin, bevacizumab/gemcitabine,
gemcitabine/oxaliplatin/rituximab, L-asparaginase/gemcitabine/oxaliplatin.
cladribine/cytarabine/filgrastim/idarubicin/plerixafor, gemcitabine/irinotecan, 5-
fluorouracil/gemcitabine, cladribine/peginterferon alfa-2a, gemcitabine/pemetrexed,
cladribine/cytarabine/decitabine, cyclophosphamide/gemcitabine/prednisolone/rituximab/vincristine,
gemcitabine, cladribine
>9002_216288_at
zeneca ZD 3523, montelukast, zafirlukast, pranlukast
>9035_203989_x_at
chrysalin, vorapaxar, argatroban, bivalirudin
>9040_204735_at
enprofylline, dyphylline, caffeine/ergotamine, arofylline, tetomilast, L 869298, ioudilast,
apremilast, aspirin/dipyridamole/telmisartan, drotaverin, anagrelide, cilomilast, milrinone,
dipyridamole, L-826,141, aspirin/dipyridamole, amrinone, ketotifen, roflumilast, theophylline,
pentoxifylline, caffeine
>921_211286_x_at
sargramostim, mavrilimumab, EPO/sargramostim, rituximab/sargramostim
>921_213475_s_at
efalizumab
>921_1561080_at
arsenic trioxide/tretinoin, arsenic trioxide/caunorubicin/tretinoin, arsenic trioxide/gemtuzumab
ozogamicin/tretinoin, arsenic trioxide/idarubicin/tretinoin, ethaselen, arsenic trioxide
>9365_213631_x_at
teriflunomide, leflunomide
>1711_215365_at
amlodipine/hydrochlorothiazide/valsartan, amlodipine/telmisartan, aliskiren/amlodipine,
aliskiren/amlodipine/hydrochlorothiazide, nilvadipine, amlodipine/valsartan, amlodipine/perindopril,
amlodipine/benazepril, verapamil, mibefradil, enalapril/felodipine, amlodipine/atorvastatin,
nisoldipine, isradipine, felodipine, nimodipine, nitrendipine, amlodipine, nicardipine, nifedipine,
trandolapril/verapamil
>1723_210389_x_at
epothilone B, colchicine/probenecid, larotaxel, eribulin, davunetide, vintafolide, milataxel,
cevipabulin, gemcitabine/paclitaxel, docetaxel/prednisone, capecitabine/docetaxel,
paclitaxel/trastuzumab, cyclophosphamide/prednisone/vincristine, docetaxel/hydrocortisone,
cyclophosphamide/docetaxel, gemcitabine/vinorelbine,
cyclophosphamide/daunorubicin/imatinib/prednisone/vincristine,
cyclophosphamide/topotecan/vincristine, docetaxel/gemcitabine, docetaxel/gemcitabine/vincristine,
irinctecan/vincristine, irinotecan/temozolomice/vincristine, bevacizumab/paclitaxel,
cyclophosphamide/docetaxel/epirubicin/5-fluorouracil/trastuzumab, docetaxel/trastuzumab,
trastuzumab/vinorelbine, gemcitabine/oxaliplatin/paclitaxel, cyclophosphamide/epirubicin/vincristine,
docetaxel/irinotecan, docetaxel/5-fluorouracil/oxaliplatin, capecitabine/docetaxel/gemcitabine, L-
asparaginase/prednisone/vincristine, cyclophosphamide/etoposide/prednisone/rituximab/vincristine,
cyclophosphamide/vinorelbine, cyclophosphamide/mitoxantrone/prednisone/vincristine,
cyclophosphamide/etoposide/prednisone/vincristine, cyclophosphamide/prednisone/rituximab/vincristine,
cyclophosphamide/mitoxantrone/prednisone/rituximab/vincristine, plinabulin, docetaxel/epirubicin,
docetaxel/paclitaxel,
epirubicin/paclitaxel, bevacizumab/paclitaxel/topotecan, paclitaxel/topotecan, bevacizumab/docetaxel,
cyclophosphamide/prednisolone/vincristine, cyclophosphamide/prednisolone/rituximab/vincristine,
cyclophosphamide/epirubicin/5-fluorouracil/vinorelbine, cyclophosphamide/epirubicin/5-
fluorouracil/paclitaxel/trastuzumab, cyclophosphamide/epirubicin/5-fluorouracil/paclitaxel,
cyclophosphamide/docetaxel/epirubicin/5-fluorouracil, cyclophosphamide/docetaxel/trastuzumab,
cyclophosphamide/gemcitabine/prednisolone/rituximab/vincristine, docetaxel, vinflunine, vinorelbine,
vincristine, vinolastine, paclitaxel, podophyllotoxin, colchicine
>1792_211277_x_at
bapineuzumab, florbetapir F18, florbetaben F
>1891_228813_at
tributyrin, belinostat, pyroxamide, romidepsin
>2035_209193_at
AZD-1208, LGH447
>2045_202464_s_at
PFK-158
>2049_202015_x_at
nitroxoline, beloranib, XMT-1107, PP1-2458
>2080_207536_s_at
urelumab
>130_205628_at
cytarabine/fludarabine phosphate, cyclophosphamide/fludarabine phosphate/rituximab,
cytarabine/filgrastim/fludarabine phosphate, fludarabine phosphate/rituximab,
dexamethasone/fludarabine phosphate/mitoxantrone, alemtuzumab/cyclophosphamide/fludarabine
phosphate/rituximab, alemetuzumab/fludarabine phosphate, cytarabine/fludarabine
phosphate/oxaliplatin/rituximab, cyclophosphamide/fludarabine phosphate/mitoxantrone/rituximab,
fludarabine phosphate/mitoxantrone/rituximab, dexamethasone/fludarabine
phosphate/mitoxantrone/rituximab, fludarabine phosphate/mitoxantrone, cyclophosphamide/fludarabine
phosphate/mitoxantrone, alemtuzumab/cyclophosphamide/fludarabine phosphate/mitoxantrone,
chlorambucil/fludarabine phosphate, fludarabine phosphate
>2365_1559206_at
tarenflurbil
>2379_210636_at
treprostinil, icosapent, GW501516, bezafibrate
>2383_214601_at
5,6,7,8-tetrahydrobiopterin
>2497_230808_at
lonafarnib
>2555_226212_s_at
insulin detemir, INS, canakinumab/INS, insulin aspart/insulin detemir, ceritinib, insulin
glargine/insulin lispro, KW-2450, insulin aspart, insulin glulisine, insulin lispro, insulin
glargine, protamine zinc insulin
>2603_208818_s_at
carbidopa/entacapone/levodopa, BIA-3-202, tolcapone, entacapone
>2603_208817_at
carbidopa/entacapone/levodopa, BIA-3-2 02, tolcapone, entacapone
>2747_1559420_x_at
amlodipine/hydrochlorothiazide/valsartan, amlodipine/telmisartan, aliskiren/amlodipine,
aliskiren/amlodioine/hydrochlorothiazide, nilvadipine, amlodipine/valsartan, amlodipine/perindopril,
amlodipine/benazepril, verapamil, mibefradil, enalapril/felodipine, amlodipine/atorvastatin,
nisoldipine, isradipine, felodipine, nimodipine, nitrendipine, amlodipine, nicardipine, nifedipine,
trandolapril/verapamil
>2747_1559419_at
amlodipine/hydrochlorothiazide/valsartan, amlodipine/telmisartan, aliskiren/amlodipine,
aliskiren/amlodipine/hydrochlorothiazide, nilvadipine, amlodipine/valsartan, amlodipine/perindopril,
amlodipine/benazepril, verapamil, mibefradii, enalapril/felodipine, amlodipine/atorvastatin,
nisoldipine, isradipine, felodipine, nimodipine, nitrendipine, amlodipine, nicardipine, nifedipine,
trandolapril/verapamil
>3395_220791_x_at
riluzole, zonisamide
>3609_215404_x_at
pazopanib, lenvatinib, nintedanib, regorafenib, bortezomib/sorafenib,
dexamethasone/lenalidomide/sorafenib, GSK3052230, lucitanib, cytarabine/idarubicin/sorafenib, 5-
azacytidine/sorafenib, decitabine/sorafenib, debio 1347, ARQ 087, sulfatinib, everolimus/sorafenib,
sorafenib
>3626_202532_s_at
pyrimethamine, trimethoprim, iclaprim, proguanil, methotrexate/ofatumumab,
methotrexate/sirolimus/tacrolimus, pralatrexate, abatacept/methotrexate, infliximab/methotrexate,
methotrexate/rituximab, golimumab/methotrexate, cisplatin/doxorubicin/methotrexate,
cytarabine/methotrexate, cisplatin/doxorubicin/ifosfamide/methotrexate,
methotrexate/rituximab/temozolomide, ifosfamice/methotrexate, bevacizumab/pemetrexed,
cytarabine/dexamethasone/methetrexate, leucovorin/methotrexate, cyclophosphamide/methotrexate,
adalimumab/methotrexate, gemcitabine/pemetrexed, epinephrine/methotrexate, dihydrofolate reductase
inhibitor, ABTL0812, methotrexate, atovaquone/proguanil, sulfisoxazole, triamterene, folic acid,
trimetrexate, pemetrexed, talctrexin
>3953_210528_at
anti-thymocyte globulin (rabbit)
>3953_210771_at
choline fenofibrate, aleglitazar, fenofibric acid/rosuvastatin, atorvastatin/choline fenofibrate,
choline fenofibrate/simvastatin, ezetimibe/fenofibrate, fenofibrate/simvastatin, NS-220,
tesaglitazar, bezafibrate, clofibrate, fenofibrate, docosahexaenoic acid, gemfibrozil
>3993_203460_s_at
tarenflurbil
>4331_1557197_a_at
GR-MD-02
>4331_215709_at
cytarabine/fludarabine phosphate, cyclophosphamide/fludarabine phosphate/rituximab,
cytarabine/filgrastim/fludarabine phosphate, fludarabine phosphate/rituximab,
dexamethasone/fludarabine phosphate/mitoxantrone, alemtuzumab/cyclophosphamide/fludarabine
phosphate/rituximab, alemtuzumab/fludarabine phosphate, cytarabine/fludarabine
phosphate/oxaliplatin/rituximab, cyclophosphamide/fludarabine phosphate/mitoxantrone/rituximab,
fludarabine phosphate/mitoxantrone/rituximab, dexamethasone/fludarabine
phosphate/mitoxantrone/rituximab, fludarabine phosphate/mitoxantrone, cyclophosphamide/fludarabine
phosphate/mitoxantrone, alemtuzumab/cyclophosphamide/fludarabine phosphate/mitoxantrone,
chlorambucil/fludarabine phosphate, fludarabine phosphate
>4426_1558199_at
ocriplasmin, L19-IL2 monoclonal antibody-cytokine fusion protein
>4484_205998_x_at
cobicistat, cobicistat/elvitegravir/emtricitabine/tenofovir disoproxil, atazanavir/cobicistat,
cobicistat/darunavir, ketoconazole
>4484_231775_at
trm-1
>4557_225609_at
carmustine/prednisone, carmustine
>4621_216261_at
abciximab, TP 9201, cilengitide, tirofiban
>379_201404_x_at
carfilzomib, bortezomib/cladribine/rituximab, bortezomib/sorafenib, bortezomib/paclitaxel,
bortezomib/dexamethasone, bortezomib/dexamethasone/doxorubicin,
bortezomib/dexamethasone/lenalidomide, bortezomib/dexamethasone/thalidomide,
carfilzomib/dexamethasone/lenalidomide, bortezomib/prednisone, bortezomib/doxorubicin,
bortezomib/vorinostat, bortezomib/thalidomide, bortezomib/rituximab,
bortezomib/dexamethasone/rituximab, carfilzomib/dexamethasone/rituximab, bortezomib
>379_210917_at
dasatinib
>5212_1569554_at
17-alpha-ethinylestradiol, fulvestrant, beta-estradiol, estradiol 17beta-cypionate, estrone,
estradiol valerate, CHF-4227, bazedoxifene, estradiol valerate/testosterone enanthate, TAS-108,
ethinyl estradiol/ethynodiol diacetate, estradiol acetate, esterified estrogens, estradiol
cypionate/medroxyprogesterone acetate, estradiol/norethindrone acetate, estradiol
cypionate/testosterone cypionate, synthetic conjugated estrogens, 3, CC8490, MITO-4509, megestrol
acetate/tamoxifen, sulindac/tamoxifen, sulindac/toremifene, raloxifene/sulindac, goserelin/tamoxifen,
raloxifene/teriparatide, desogestrel/ethinyl estradiol, drospirenone/ethinyl estradiol, premarin,
ethinyl estradiol/norelgestromin, ethinyl estradiol/norethindrone, ethinyl estradiol/levonorgestrel,
ethinyl estradiol/norgestrel, ethinyl estradiol/norgestimate, conjugated estrogen/medroxyprogesterone
acetate, diethylstilbestrol, ospemifene, toremifene, tamoxifen, prinaberel, raloxifene, arzoxifene,
clomiphene, estramustine phosphate, diethylstilbestrol diphosphate, estropipate, genistein,
trilostane
>5212_1554710_at
tedisamil
>9457_201746_at
CGM097, kevetrin
>9460_211590_x_at
S-18886, ridogrel, torsemide
>9463_211173_at
dexloxiglumide, lintitript, T-0632
>9463_201244_s_at
CHIR-265, vemurafenib, dabrafenib, regorafenib, bortezomib/sorafenib,
dexamethasone/lenalidomide/sorafenib, bevacizumab/sorafenib, dabrafenib/trametinib,
cytarabine/idarubicin/sorafenib, 5-azacytidine/sorafenib, decitabine/sorafenib, MLN2480,
cobimetinib/vemurafenib, everolimus/sorafenib, sorafenib
>9501_211164_at
anti-EphA3 monoclonal antibody KB004
>9630_206341_at
LMB-2, daclizumab, basiliximab, aldesleukin, cenileukin diftitox
>504_204713_s_at
drotrecogin alfa, antithrombin alfa
>9831_221152_at
collagenase Clostridium histolyticum
>559_210005_at
bevacizumab/pemetrexed, gemcitabine/pemetrexed, pemetrexed
>559_244689_at
choline fenofibrate, aleglitazar, fenofibric acid/rosuvastatin, atorvastatin/choline fenofibrate,
choline fenofibrate/simvastatin, ezetimibe/fenofibrate, fenofibrate/simvastatin, NS-220,
tesaglitazar, bezafibrate, clofibrate, fenofibrate, docosahexaenoic acid, gemfibrozil
>639_205481_at
adenosine, dyphylline, aspirin/butalbital/caffeine, acetaminophen/caffeine/dihydrocodeine,
acetaminophen/aspirin/caffeine, caffeine/ergotamine, aspirin/caffeine/propoxyphene,
aspirin/butalbital/caffeine/codeine, aspirin/caffeine/dihydrocodeine, caffeine/ethanol,
acetaminophen/butalbital/caffeine, aminophylline, aspirin/caffeine/orphenadrine, clofarabine,
acetaminophen/butalbital/caffeine/codeine, theophylline, pentoxifylline, caffeine, theobromine,
tecadenoson, acetaminophen/caffeine/chlorpheniramine/hydrocodone/phenylephrine
>720_216261_at
abciximab, TP 9201, cilengitide, tirofiban
>796_211286_x_at
sargramostim, mavrilimumab, EPO/sargramostin, rituximab/sargramostim
>796_1569554_at
17-alpha-ethinylestradiol, fulvestrant, beta-estradiol, estradiol 17beta-cypionate, estrone,
estradiol valerate, CHF-4227, bazedoxifene, estradiol valerate/testosterone enanthate, TAS-108,
ethinyl estradiol/ethynodiol diacetate, estradiol acetate, esterified estrogens, estradiol
cypionate/medroxyprogesterone acetate, estradiol/norethindrone acetate, estradiol
cypionate/testosterore cypionate, synthetic conjugated estrogens, 3, CC8490, MITO-4509, megestrol
acetate/tamoxifen, stlindac/tamoxifen, sulindac/toremifene, raloxifene/sulindac, goserelin/tamoxifen,
raloxifene/teriparatide, desogestrel/ethinyl estradiol, drospirenone/ethinyl estradiol, premarin,
ethinyl estradiol/norelgestromin, ethinyl estradiol/norethindrone, ethinyl estradiol/levonorgestrel,
ethinyl estradiol/norgestrel, ethinyl estradiol/norgestimate, conjugated estrogen/medroxyprogesterone
acetate, diethylstilbestrol, espemifene, toremifene, tamoxifen, prinaberel, raloxifene, arzoxifene,
elomiphene, estramustine phosphate, diethylstilbestrol diphosphate, estropipate, genistein,
trilostane
>796_1559206_at
tarenflurbil
>5679_1554710_at
tedisamil
>6249_220791_x_at
riluzole, zonisamide
>5732_203672_x_at
olsalazine
>5736_208306_x_at
apolizumab
>6619_202015_x_at
nitroxoline, beloranib, XMT-1107, PPI-2458
>6698_216288_at
zeneca ZD 3523, montelukast, zafirlukast, pranlukast
>6713_229711_s_at
CGM097, DS-3032b, HDM201, RO5503781, RO6839921
>5873_207554_x_at
S-18886, ridogrel, torsemide
>New 33_210917_at
dasatinib
>5618_201746_at
CGM097, kevetrin
>8303_215709_at
cytarabine/fludarabine phosphate, cyclophosphamide/fludarabine phosphate/rituximab,
cytarabine/filgrastim/fludarabine phosphate, fludarabine phosphate/rituximab,
dexamethasone/fludarabine phosphate/mitoxantrone, alemtuzumab/cyclophosphamide/fludarabine
phosphate/rituximab, alemtuzumab/fludarabine phosphate, cytarabine/fludarabine
phosphate/oxaliplatin/rituximab, cyclophosphamide/fludarabine phosphate/mitoxantrone/rituximab,
fludarabine phosphate/mitoxantrone/rituximab, dexamethasone/fludarabine
phosphate/mitoxantrone/rituximab, fludarabine phosphate/mitoxantrone, cyclophosphamide/fludarabine
phosphate/mitoxantrone, alemtuzumab/cyclophosphamide/fludarabine phosphate/mitoxantrone,
chlorambucil/fludarabine phosphate, fludarabine phosphate
>8766_207822_at
pazopanib, lenvatinib, nintedanib, regorafenib, bortezomib/sorafenib,
dexamethasone/lenalidomide/sorafenib, GSK3052230, lucitanib, cytarabine/idarubicin/sorafenib, 5-
azacytidine/sorafenib, decitabine/sorafenib, cebio 1347, ARQ 087, sulfatinib, everolimus/sorafenib,
sorafenib
>5937_210224_at
anti-thymocyte globulin (rabbit)
>5937_1570200_at
cyclophosphamide/epirubicin/5-fluorouracil, cyclophosphamide/epirubicin,
cyclophosphamide/docetaxel/epirubicin/5-fluorouracil/trastuzumab,
cyclophosphamide/epirubicin/vincristine, epirubicin/5-fluorouracil/oxaliplatin,
capecitabine/epirubicin/oxaliplatin, docetaxel/epirubicin, epirubicin/paclitaxel,
cyclophosphamide/epirubicin/5-fluorouracil/vinorelbine, cyclophosphamide/epirubicin/5-
fluorouracil/paclitaxel/trastuzumab, cyclophosphamide/epirubicin/5-fluorouracil/paclitaxel,
cyclophosphamide/docetaxel/epirubicin/5-fluorouracil, epirubicin
>9002_221152_at
collagenase clostridium histolyticum
>9051_205628_at
cytarabine/fludarabine phosphate, cyclophosphamide/fludarabine phosphate/rituximab,
cytarabine/filgrastim/fludarabine phosphate, fludarabine phosphate/rituximab,
dexamethasone/fludarabine phosphate/mitoxantrone, alemtuzumab/cyclophosphamide/fludarabine
phosphate/rituximab, alemtuzumab/fludarabine phosphate, cytarabine/fludarabine
phosphate/oxaliplatin/rituximab, cyclophosphamide/fludarabine phosphate/mitoxantrone/rituximab,
fludarabine phosphate/mitoxantrone/rituximab, dexamethasone/fludarabine
phosphate/mitoxantrone/rituximab, fludarabine phosphate/mitoxantrone, cyclophosphamide/fludarabine
phosphate/mitoxantrone, alemtuzumab/cyclophosphamide/fludarabine phosphate/mitoxantrone,
chlorambucil/fludarabine phosphate, fludarabine phosphate
>1043_206792_x_at
dyphylline, nitroglycerin, caffeine/ergotamine, arofylline, tetomilast, L 869298, ibudilast,
aminophylline, anagrelide, cilomilast, milrinone, dipyridamole, L-826,141, ketotifen, roflumilast,
Lolbutamide, theophylline, pentoxitylline, caffeine
>1047_201404_x_at
carfilzomib, bortezomib/cladribine/rituximab, bortezomib/sorafenib, bortezomib/paclitaxel,
bortezomib/dexamethasone, bortezomib/dexamethasone/doxorubicin,
bortezomib/dexamethasone/lenalidomide, bortezomib/dexamethasone/thalidomide,
carfilzomib/dexamethasone/lenalidomide, bortezomib/prednisone, bortezomib/doxorubicin,
bortezomib/vorinostat, bortezomib/thalidomide, bortezomib/rituximab,
bortezomib/dexamethasone/rituximab, carfilzomib/dexamethasone/rituximab, bortezomib
>1047_244616_x_at
CGM097, DS-3032b, HDM201, RO5503781, RO6839921
>1562_208828_at
bortezomib/cladribine/rituximab, gemcitabine/paclitaxel, cladribine/cytarabine/daunorubicin,
gemcitabine/oxaliplatin, gemcitabine/vinorelbine, docetaxel/gemcitabine,
docetaxel/gemcitabine/vincristine, cladribine/cytarabine/filgrastim, capecitabine/gemcitabine,
gemcitabine/oxaliplatin/paclitaxel, cladribine/cytarabine/filgrastim/mitoxantrone,
cladribine/rituximab, capecitabine/docetaxel/gemcitabine,
cladribine/cytarabine/filgrastim/idarubicin, bevacizumab/gemcitabine,
gemcitabine/oxaliplatin/rituximab, L-asparaginase/gemcitabine/oxaliplatin,
cladribine/cytarabine/filgrastim/idarubicin/plerixafor, gemcitabine/irinotecan, 5-
fluorouracil/gemcitabine, cladribine/peginterferon alfa-2a, gemcitabine/pemetrexed,
cladribine/cytarabine/decitabine, cyclophosphamide/gemcitabine/prednisolone/rituximab/vincristine,
gemcitabine, cladribine
>9338_216439_at
vemurafen ib, osimertinib, cobimetinib/vemurafenib
>9338_1552343_s_at
dyphylline, nitroglycerin, aminophylline, anagrelide, milrinone, dipyridamole, ketotifen,
tolbutamide, theophylline, pentoxifylline
>9345_214601_at
5,6,7,8-tetrahydrobiopterin
>9365_237469_at
novobiocin, etoposide, teniposide, CPI-0004Na, becatecarin, elsamitrucin, AQ4N, elomotecan,
tafluposide, fleroxacin, cyclophosphamide/epirubicin/5-fluorouracil, cytarabine/daunorubicin,
finafloxacin, hydrocortisone/mitoxantrone, nitoxantrone/prednisone,
cladribine/cytarabine/daunorubicin, cytarabine/daunorubicin/tretinoin, cytarabine/idarubicin,
idarubicin/mitoxantrone/tretinoin, arsenic trioxide/daunorubicin/tretinoin, cytarabine/etoposide,
cytarabine/etoposide/mitoxantrone, cytarabine/mitoxantrone, daunorubicin/tretinoin,
idarubicin/tretinoin, bortezomib/dexamethasone/doxorubicin, cisplatin/doxorubicin/methotrexate,
cyclophosphamide/epirubicin, cyclophosphamide/etoposide,
cisplatin/doxorubicin/ifosfamide/methotrexate, cisplatin/doxorubicin,
cyclophosphamide/docetaxel/epirubicin/5-fluorouracil/trastuzumab,
clofarabine/cyclophosphamide/etoposide, cyclophosphamide/epirubicin/vincristine,
bortezomib/doxorubicin, carboplatin/doxorubicin, cladribine/cytarabine/filgrastim/mitoxantrone,
epirubicin/5-fluorouracil/oxaliplatin, dacarbazine/doxorubicin, cytarabine/filgrastim/fludarabine
phosphate/idarubicin, capecitabine/epirubicin/oxaliplatin, doxorubicin/ifosfamide,
cladribine/cytarabine/filgrastim/idarubicin, doxorubicin/streptozocin,
dacarbazine/doxorubicin/ifosfamide, dexamethasone/fludarabine phosphate/mitoxantrone,
cyclophosphamide/etoposide/prednisone/rituximab/vincristine, cyclophosphamide/fludarabine
phosphate/mitoxantrone/rituximab, fludarabine phosphate/mitoxantrone/rituximab,
cyclophosphamide/mitoxantrone/prednisone/vincristine,
cyclophosphamide/etoposide/prednisone/vincristine, dexamethasone/fludarabine
phosphate/mitoxantrone/rituximab, chlorambucil/mitoxantrone/prednisone, fludarabine
phosphate/mitoxantrone, cyclophosphamide/fludarabine phosphate/mitoxantrone,
alemtuzumab/cyclophosphamide/fludarabine phosphate/mitoxantrone,
cyclophosphamide/mitoxantrone/prednisone/rituximab/vincristine,
cladribine/cytarabine/filgrastim/idarubicin/plerixafor, doxorubicin/tretinoin,
cytarabine/doxorubicin, chlorambucil/mitoxantrone/prednisone/rituximab, docetaxel/epirubicin,
doxorubicin/paclitaxel, epirubicin/paclitaxel, arsenic trioxide/idarubicin/tretinoin,
clofarabine/filgrastim/idarubicin, clofarabine/cytarabine/filgrastim/idarubicin,
cyclophosphamide/epirubicin/5-fluorouracil/vinorelbine, cyclophosphamide/epirubicin/5-
fluorouracil/paclitaxel/trastuzumab, cytarabine/idarubicin/sorafenib, cyclophosphamide/epirubicin/5-
fluorouracil/paclitaxel, cyclophosphamide/docetaxel/epirubicin/5-fluorcuracil, mitoxantrone,
amsacrine, norfloxacin, dexrazoxane, tirapazamine, TAS-103, gatifloxacin, valrubicin, gemifloxacin,
nemorubicin, nalidixic acid, levofloxacin, epirubicin, doxorubicin, idarubicin, daunorubicin,
podophyllotoxin, cis-sparfloxacin
>1732_211277_x_at
bapineuzumab, florbetapir F18, florbetaben F
>2045_230808_at
lonafarnib
>2089_211590_x_at
S-18886, ridogrel, torsemide
>123_1559420_x_at
amlodipine/hydrochlorothiazide/valsartan, anlodipine/telmisartan, aliskiren/amlodipine,
aliskiren/amlodipine/hydrochlorothiazide, nilvadipine, amlodipine/valsartan, amlodipine/perindopril,
amlodipine/benazepril, verapamil, mibefradil, enalapril/felodipine, amlodipine/atorvastatin,
nisoldipine, isradipine, felodipine, nimodipine, nitrendipine, amlodipine, nicardipine, nifedipine,
trandolapril/verapamil
>123_1559419_at
amlodipine/hydrochlorothiazide/valsartan, anlodipine/telmisartan, aliskiren/amlodioine,
aliskiren/amlodipine/hydrochlorothiazide, nilvadipine, amlodipine/valsartan, amlodipine/perindopril,
amlodipine/benazepril, verapamil, mibefradii, enalapril/felodipine, amlodipine/atorvastatin,
nisoldipine, isradipine, felodipine, nimodipire, nitrendipine, amlodipine, nicardipine, nifedipine,
trandolapril/verapamil
>2824_215404_x_at
pazopanib, lenvatinib, nintedanib, regorafenib, bortezomib/sorafenib,
dexamethasone/lenalidomide/sorafenib, GSK3052230, lucitanib, cytarabine/idarubicin/sorafenib, 5-
azacytidine/sorafenib, decitabine/sorafenib, cebio 1347, ARQ 087, sulfatinib, everolimus/sorafenib,
sorafenib
>2824_213631_x_at
teriflunomide, lefluromide
>2824_206482_at
vandetanib
>2824_224029_x_at
riluzole, zonisamide
>2824_1569938_at
suramin
>2824_1569748_at
pkc-zeta inhibitor, ingenol mebutate
>2824_1552648_a_at
trm-1
>2824_211265_at
misoprostol, prostaglandin E2, prostaglandin E1, diclofenac/misoprostol, bimatoprost
>2824_1557197_a_at
GR-MD-02
>3465_201695_s_at
forodesine, PD 141955, purine nucleoside phosphorylase inhibitor
>4268_207536_s_at
urelumab
>4331_210771_at
choline fenofibrate, aleglitazar, fenofibric acid/rosuvastatin, atorvastatin/choline fenofibrate,
choline fenofibrate/simvastatin, ezetimibe/fenofibrate, fenofibrate/simvastatin, NS-220,
tesaglitazar, bezafibrate, clofibrate, fenofibrate, docosahexaenoic acid, gemfibrozil
>4331_210528_at
anti-thymocyte globulin (rabbit)
>4331_206370_at
5F 1126, PX-866, PI3Kg inhibitor, dactolisib, pictilisib, bu
parlisib, XL147, PQR309, RP6530
>345_211164_at
anti-EphA3 monoclonal antibody KB004
>4579_205998_x_at
cobicistat, cobicistat/elvitegravir/emtricitabine/tenofovir disoproxil, atazanavir/cobicistat,
cobicistat/darunavir, ketoconazole
>4579_215179_x_at
aflibercept, aflibercept/irinctecan
>4579_204920_at
N-carbamyl-L-glutamate
>5016_202532_s_at
pyrimethamine, trimethoprim, iclaprim, proguanil, methotrexate/ofazumumab,
methotrexate/sirolimus/tacrolimus, pralatrexate, abatacept/methotrexate, infliximab/methotrexate,
methotrexate/rituximab, golimumab/methotrexate, cisplatin/doxorubicin/methotrexate,
cytarabine/methotrexate, cisplatin/doxorubicin/ifosfamide/methotrexate,
methotrexate/rituximab/temozolomide, ifosfamice/methotrexate, bevacizumab/pemetrexed,
cytarabine/dexamethasone/methotrexate, leucovorin/methotrexate, cyclophosphamide/methotrexate,
adalimumab/methotrexate, gemcitabine/pemetrexed, epinephrine/methotrexate, dihydrofolate reductase
inhibitor, ABTL0812, methotrexate, atovaquone/proguanil, sulfisoxazole, triamterene, folic acid,
trimetrexate, pemetrexed, talctrexin
>5043_1555572_at
methazolamide, hydrochlorothiazide, acetazolamide, trichloromethiazide, chlorothiazide,
chlorthalidone, benzthiazide, sulfacetamide, topiramate
>416_215365_at
amlodipine/hydrochlorothiazide/valsartan, amlodipine/telmisartan, aliskiren/amlodipine,
aliskiren/amlodipine/hydrochlorothiazide, nilvadipine, amlodipine/valsartan, amlodipine/perindopril,
amlodipine/benazepril, verapamil, mibefradil, enalapril/felodipine, amlodipine/atorvastatin,
nisoldipine, isradipine, felodipine, nimodipire, nitrendipine, amlodipine, nicardipine, nifedipine,
trandolapril/verapamil
>416_1561080_at
arsenic trioxide/tretinoin, arsenic trioxide/caunorubicin/tretinoin, arsenic trioxide/gemtuzumab
ozogamicin/tretinoin, arsenic trioxide/idarubicin/tretinoin, ethaselen, arsenic trioxide
>416_213475_s_at
efalizumab
>5316_203989_x_at
chrysalin, vorapaxar, argatroban, bivalirudin
>5316_210389_x_at
epothilone B, colchicine/probenecid, larotaxel, eribulin, davunetide, vintafolide, milataxel,
cevipabulin, gemcitabine/paclitaxel, docetaxel/prednisone, capecitabine/docetaxel,
paclitaxel/trastuzumab, cyclophosphamide/prednisone/vincristine, docetaxel/hydrocortisone,
cyclophosphamide/docetaxel, gemcitabine/vinorelbine,
cyclophosphamide/daurorubicin/imatinib/prednisone/vincristine,
cyclophosphamide/topotecan/vincristine, docetaxel/gemcitabine, docetaxel/gemcitabine/vincristine,
irinctecan/vincristine, irinotecan/temozolomice/vincristine, bevacizumab/paclitaxel,
cyclophosphamide/docetaxel/epirubicin/5-fluorouracil/trastuzumab, docetaxel/trastuzumab,
trastuzumab/vinorelbine, gemcitabine/oxaliplatin/paclitaxel, cyclophosphamide/epirubicin/vincristine,
docetaxel/irinotecan,
docetaxel/5-fluorouracil/oxaliplatin, capecitabine/docetaxel/gemcitabine, L-
asparaginase/prednisone/vincristine, cyclophosphamide/etoposide/prednisone/rituximab/vincristine,
cyclophosphamide/vinorelbine, cyclophosphamide/mitoxantrone/prednisone/vincristine,
cyclophosphamide/etoposide/prednisone/vincristine, cyclophosphamide/prednisone/rituximab/vincristine,
cyclophosphamide/mitoxantrone/prednisone/rituximab/vincristine, plinabulin, docetaxel/epirubicin,
docetaxel/paclitaxel, epirubicin/paclitaxel, bevacizumab/paclitaxel/topotecan, paclitaxel/topotecan,
bevacizumab/docetaxel, cyclophosphamide/prednisolone/vincristine,
cyclophosphamide/prednisolone/rituximab/vincristine, cyclophosphamide/epirubicin/5-
fluorouracil/vinorelbine, cyclophosphamide/epirubicin/5-fluorouracil/paclitaxel/trastuzumab,
cyclophosphamide/epirubicin/5-fluorouracil/paclitaxel, cyclophosphamide/docetaxel/epirubicin/5-
fluorouracil, cyclophosphamide/docetaxel/trastuzumab,
cyclophosphamide/gemcitabine/prednisolone/rituximab/vincristine, docetaxel, vinflunine, vinorelbine,
vincristine, vinolastine, paclitaxel, podophyllotoxin, colchicine
>5328_207516_at
ABT-089, isoflurane, mecamylamine, succinylcholine, rocuronium, doxacurium, mivacurium, pipecuronium,
rapacuronium, metocurine, atracurium, cisatracurium, acetylcholine, nicotine, D-tubocurarine,
arecoline, ibogaine, enflurane, pancuronium, vecuronium
>5328_244677_at
avibactam
>5328_210636_at
treprostinil, icosapent, GW501516, bezafibrate
>5328_202707_at
pyrazofurin, gimcracil/oxonic acid/tegafur, oxonic acid
>5496_1558199_at
ocriplasmin, L19-IL2 monoclonal antibody-cytokine fusion protein
>9628_221170_at
tesmilifene, triprolidine, buclizine
>9628_231775_at
trm-1
>504_204713_s_at
drotrecogin alfa, antithrombin alfa

List 3
Table 5 list of genes

>3
ABCA10, ABCA12, ABCA13, ABCA4, ABCC6, ABHD3, ACADSB, ACOT7, ACSS2, ADAM23, ADAMTS6, ADCY8, adenosine triphosphate,
AGBL4, AGK, AHI1, AKAP9, ALG8, ALOX5, ANK3, ANKRD30A, ANKRD50, ANKS1B, ARHGAP24, ARHGEF4, ATRX, BEND7, BMPR2,
BNC2, BRAF, CADM2, CASP8, CASR, CCDC105, CCDC178, CCSER1, CCT8, CD22, CDH10, CDH13, CFH, CNTN5, CNTNAP2, COL19A1,
CPNE4, CPNE8, CPXCR1, CTNNA3, CTNND2, CTSB, CUBN, CYP3A5, DCC, DDAH1, DDIT4, DHRS2, DISC1, DLGAP2, DNAH11, DNAH14,
DNAJC13, DOCK4, DYSF, EPHA7, EPHX1, EPHX2, ERBB3, ERBB4, ESRRG, EYS, FAF1, FANCI, FAT4, FOXP2, FRAS1, FSTL9, GABRB1,
GABRG2, GOLIM4, GPC5, GRID2, GRIK2, GRM4, GRM5, GRM8, GYS2, HCN1, HIVEP1, HMCN1, HMGCR, HPGD, HYOU1, IL15,
IL1RAPL1, IQGAP2, ITGA8, ITGAM, ITPR2, KCNH8, KCNN2, KCTD8, KDM6A, KIF26B, KLHL3, KLHL4, LARS2, LBR, LDHC, LDLRAP1,
LINGO2, LMBR1, LMO1, LRRK2, LUZP2, MASP2, MAST4, MB21D2, MERTK, MMP2, MS4A4E, MTUS2, MYRIP, NCOA3, NFKB1, NKAIN2,
NKAIN3, NMT2, NRG3, NSUN6, NUDT13, OCA2, OPHN1, OSBPL1A, PARD3, PDE11A, PDE4D, PDZRN4, PEX5, PKHD1, PLCL1, PLXDC2,
PPARGC1A, PPP2R2B, PRKAG2, PRMT6, PROS1, PRPF8, PTPN22, PTPRD, PTPRN2, PXDNL, RAPGEF2, RAPSN, RIT2, RNF180, RNF19A,
ROBO2, SARDH, SCAPER, SCG3, SH3RF3, SIL1, SLC22A20, SLC25A12, SLC37A2, SLC6A3, SLCO3A1, SMOC2, SOD1, SPAG17, SQSTM1,
STAG2, STAM, STXBP5L, SUOX, SYK, SYNE2, TCHH, TEK, TENM2, THOP1, THSD7B, TLN2, TNFSF11, TNNI3K, TRHDE, TRIM36,
TUSC3, UGGT2, UTRN, UVRAG, VAV3, VCAM1, VPS13B, WDR27, XK, XKR4, ZFPM2
>4
ABCA10, ABCA12, ABCA13, ABCA4, ABCC6, ABHD3, ACADSB, ACOT7, ACSS2, ADAM23, ADAMTS6, ADCY8, ADH1C, AGBL4, AGK,
AHI1, AKAP9, ALG8, ALOX5, ANK3, ANKRD30A, ANKRD50, ANKS1B, ARHGAP24, ARHGEF4, ATRX, BEND7, BMPR2, BNC2, BRAF,
CADM2, CASP8, CASR, CCDC105, CCDC178, CCSER1, CCT8, CD22, CDH10, CDH13, CNTN5, CNTNAP2, COL19A1, CPNE4, CPNE8,
CPXCR1, CTNNA3, CTNND2, CUBN, CYP1A1, CYP3A5, DCC, DDAH1, DDIT4, DHRS2, DISC1, DLGAP2, DNAH11, DNAH14, DNAJC13,
DOCK4, DYSF, EPHA7, EPHX1, EPHX2, ERBB3, ERBB4, ESRRG, EYS, FAF1, FANCI, FAT4, FOXP2, FRAS1, FSTL4, GABRB1,
GABRG2, GOLIM4, GPC5, GRID2, GRIK2, GRM4, GRM5, GRM8, GYS2, HCN1, HIVEP1, HMCN1, HMGCR, HYOU1, IL15, IL1RAPL1,
IQGAP2, ITGA8, ITGAM, ITPR2, KCNH8, KCNN2, KCTD8, KDM6A, KIF26B, KLHL3, KLHL4, LARS2, LBR, LDHC, LDLRAP1, LINGO2,
LMBR1, LMO1, LRRK2, LUZP2, MASP2, MAST4, MB21D2, MERTK, MMP2, MS4A4E, MTUS2, MYRIP, NCOA3, NFKB1, NKAIN2,
NKAIN3, NMT2, NRG3, NSUN6, NUDT13, OCA2, OPHN1, OSBPL1A, PARD3, PDE4D, PDZRN4, PEX5, PKHD1, PLCL1, PLXDC2,
PPP2R2B, PRKAG2, PRMT6, PRPF8, PTPN22, PTPRD, PTPRN2, PXDNL, RAPGEF2, RAPSN, RIT2, RNF180, RNF19A, ROBO2,
SARDH, SCAPER, SCG3, SH3RF3, SIL1, SLC22A20, SLC25A12, SLC37A2, SLCO3A1, SMOC2, SOD1, SPAG17, SQSTM1, STAG2,
STAM, STXBP5L, SUOX, SYK, SYNE2, TCHH, TEK, TENM2, THSD7B, TLN2, TNFSF11, TNNI3K, TRHDE, TRIM36, TUSC3, UGGT2,
UTRN, UVRAG, VAV3, VCAM1, VPS13B, WDR27, XK, XKR4, ZFPM2
>5
ABCA10, ABCA12, ABCA13, ABCA4, ABCC6, ABHD3, ACADSB, ACOT7, ACSS2, ADAM23, ADAMTS6, ADCY8, AGBL4, AGK, AHI1,
AKAP9, ALG8, ALOX5, ANK3, ANKRD30A, ANKRD50, ANKS1B, ARHGAP24, ARHGEF4, ATRX, BEND7, BMPR2, BNC2, BRAF,
CADM2, CASP8, CASR, CCDC105, CCDC178, CCSER1, CCT8, CD22, CDH10, CDH13, CNTN5, CNTNAP2, COL19A1, CPNE4,
CPNE8, CPXCR1, CTNNA3, CTNND2, CUBN, CYP3A5, DCC, DDAH1, DDIT4, DHRS2, DISC1, DLGAP2, DNAH11, DNAH14,
DNAJC13, DOCK4, DYSF, EPHA7, EPHX1, EPHX2, ERBB3, ERBB4, ESRRG, EYS, FAF1, FANCI, FAT4, FOXP2, FRAS1, FSTL4,
GABRB1, GABRG2, GOLIM4, GPC5, GRID2, GRIK2, GRM4, GRM5, GRM8, GYS2, HCN1, HIVEP1, HMCN1, HMGCR, HPGD, HYOU1,
IL15, IL1RAPL1, IQGAP2, ITGA8, ITGAM, ITPR2, KCNH8, KCNN2, KCTD8, KDM6A, KIF26B, KLHL3, KLHL4, LARS2, LBR, LDHC,
LDLRAP1, LINGO2, LMBR1, LMO1, LRRK2, LUZP2, MASP2, MAST4, MB21D2, MERTK, MMP2, MS4A4E, MTUS2, MYRIP, NCOA3,
NFKB1, NKAIN2, NKAIN3, NMT2, NRG3, NSUN6, NUDT13, OCA2, OPHN1, OSBPL1A, PARD3, PDE4D, PDZRN4, PEX5, PKHD1,
PLCL1, PLXDC2, PPP2R2B, PRKAG2, PRMT6, PRPF8, PTPN22, PTPRD, PTPRN2, PXDNL, RAPGEF2, RAPSN, RIT2, RNF180,
RNF19A, ROBO2, SARDH, SCAPER, SCG3, SH3RF3, SIL1, SLC22A20, SLC25A12, SLC37A2, SLCO3A1, SMOC2, SOD1, SPAG17,
SQSTM1, STAG2, STAM, STXBP5L, SUOX, SYK, SYNE2, TCHH, TEK, TENM2, THSD7B, TLN2, TNFSF11, TNNI3K, TRHDE, TRIM36,
TUSC3, UGGT2, UTN, UVRAG, VAV3, VCAM1, VPS13B, WDR27, XK, XKR4, ZFPM2
>6
ABCA10, ABCA12, ABCA13, ABCA4, ABCC6, ABHD3, ACADSB, ACOT7, ACSS2, ADAM23, ADAMTS6, ADCY8, AGBL4, AGK, AHI1,
AKAP9, ALG8, ALOX5, ANK3, ANKRD30A, ANKRD50, ANKS1B, ARHGAP24, ARHGEF4, ATRX, BEND7, BMPR2, BNC2, BRAF,
CADM2, CASP8, CASR, CCDC105, CCDC178, CCSER1, CCT8, CD22, CDH10, CDH13, CNTN5, CNTNAP2, COL19A1, CPNE4,
CPNE8, CPXCR1, CTNNA3, CTNND2, CUBN, CYP3A5, DCC, DDAH1, DDIT4, DHRS2, DISC1, DLGAP2, DNAH11, DNAH14,
DNAJC13, DOCK4, DYSF, EPHA7, EPHX1, EPHX2, ERBB3, ERBB4, ESRRG, EYS, FAF1, FANCI, FAT4, FOXP2, FRAS1, FSTL4,
GABRB1, GABRG2, GOLIM4, GPC5, GRID2, GRIK2, GRM4, GRM5, GRM8, GYS2, HCN1, HIVEP1, HMCN1, HMGCR, HYOU1, IL15,
IL1RAPL1, IQGAP2, ITGA8, ITGAM, ITPR2, KCNH8, KCNN2, KCTD8, KDM6A, KIF26B, KLHL3, KLHL4, LARS2, LBR, LDHC, LDLRAP1,
LINGO2, LMBR1, LMO1, LRRK2, LUZP2, MASP2, MAST4, MB21D2, MERTK, MMP2, MS4A4E, MTUS2, MYRIP, NCOA3, NFKB1,
NKAIN2, NKAIN3, NMT2, NRG3, NSUN6, NUDT13, OCA2, OPHN1, OSBPL1A, PARD3, PDE4D, PDZRN4, PEX5, PKHD1, PLCL1,
PLXDC2, PPP2R2B, PRKAG2, PRMT6, PRPF8, PTPN22, PTPRD, PTPRN2, PXDNL, RAPGEF2, RAPSN, RIT2, RNF180, RNF19A,
ROBO2, SARDH, SCAPER, SCG3, SH3RF3, SIL1, SLC22A20, SLC25A12, SLC37A2, SLCO3A1, SMOC2, SOD1, SPAG17, SQSTM1,
STAG2, STAM, STXBP5L, SUOX, SYK, SYNE2, TCHH, TEK, TENM2, THSD7B, TLN2, TNFSF11, TNNI3K, TRHDE, TRIM36, TUSC3,
UGGT2, UTRN, UVRAG, VAV3, VCAM1, VPS13B, WDR27, XK, XKR4, ZFPM2
>7
ABCA10, ABCA12, ABCA13, ABCA4, ABCB1, ABCC6, ACADSB, ACSL4, ACSS2, ADAM23, AGBL4, AGK, AKAP9, ALOX5, ANK3,
ANKRD30A, ANKRD50, ANKS1B, ANO3, ATRX, BBS5, BBS9, BNC2, BRAY, C12orf42, C4orf22, CASP8, CASR, CCDC7, CDH10, CDH12,
CDH13, CNTN5, CNTNAP2, COL19A1, CTNNA3, CTNND2, CUBN, CYBB, CYP19A1, CYP1A1, CYP3A5, DCC, DISC1, DLGAP2, DNAH11,
DNAH14, DNAJC13, DOCK4, DYM, DYSF, EPHA7, ERBB3, ERBB4, EYS, FAT4, FOXP2, FUT8, GABRA2, GABRB1, GABRG2, GIF, GMPR,
GRM4, GRM5, GRM8, GTDC1, HCN1, HMCN1, HMGN5, IL1RAPL1, IMMP2L, ITGAM, ITPR2, KCNH8, KDM6A, KRT6B, LHX8, LINGO2,
LRRK2, MAST4, MMP2, MTG1, MTUS2, NEK11, NRG3, OPHN1, OXGR1, PAGE4, PARD3, PDE4D, PDS5B, PDZRN4, PKHD1, PLCL1,
PPP2R2B, PRKAG2, PROS1, PRPF8, PTPN22, PTPRD, PTPRN2, PXDNL, RAPGEF2, ROBO2, SCAPER, SEMA6D, SLC24A3, SLC25A12,
SLCO3A1, SPRED2, STAG2, STXBP5L, SUSD1, SYNE2, TCHH, TEK, THOP1, THSD7B, TLN2, TNNI3K, TRHDE, TSC22D1, TUSC3, UGGT2,
ULK4, UTRN, UVRAG, VPS13B, WWTR1, XKR4, YTHDC2, ZFPM2
>8
ABCA10, ABCA12, ABCA13, ABCA4, ABCB1, ABCC6, ABHD3, ACADS, ACADSB, ACOT7, ACSL4, ACSS2, ADAM23, ADAMTS6, ADCY8,
ADH1C, AGBL4, AGK, AGXT, AHI1, AKAP9, ALDH3A2, ALG8, ALOX5, ANK3, ANKRD30A, ANKRD50, ANKS1B, ANO3, ARHGAP24,
ARHGEF4, ATRX, BBS9, BEND7, BMPR2, BNC2, BRAF, C12orf42, C4orf22, CADM2, CAPN3, CASP8, CASR, CCDC105, CCDC178, CCDC7,
CCSER1, CCT8, CD22, CD28, CD2AP, CDH10, CDH12, CDH13, CDH2, CENPK, CES3, CFH, CNBD1, CNTLN, CNTN5, CNTNAP2,
COL19A1, CPA4, CPNE4, CPNE8, CPXCR1, CRHR1, CRYM, CTNNA3, CTNND2, CTSB, CUBN, CWC27, CXCL13, CYBB, CYP19A1, CYP1A1,
CYP3A5, DAB1, DCC, DDAH1, DDIT4, DHRS2, DISC1, DLD, DLGAP2, DMRTA1, DNAH11, DNAH14, DNAJC13, DNM3, DOCK4, DYM,
DYSF, EGR2, EMB, EN1, EPHA7, EPHX1, EPHX2, ERBB3, ERBB4, ESRRG, EVC, EYS, FAF1, FAM122C, FAM172A, FANCI, FAT4,
FEM1C, FGF14, FOXN3, FOXP2, FRAS1, FSTL4, FUT8, GABRA2, GABRB1, GABRB3, GABRG2, GALNT2, GLRA2, GOLIM4, GPC5, GPR6,
GRID1, GRID2, GRIK2, GRM4, GRM5, GRM8, GTDC1, GYS2, HCN1, HGSNAT, HIVEP1, HMCN1, HMGCR, HMGN5, HPGD, HSD17B4,
HYOU1, IL15, IL1RAPL1, IL1RAPL2, IQGAP2, ITGA8, ITGAM, ITGAX, ITPR2, JAZF1, KCNE1, KCNH8, KCNN2, KCTD16, KCTD8, KDM6A,
KIF26B, KLHL3, KLHL4, KRT6B, KRTAP94, KRTAP98, KRTAP99, LALBA, LARS2, LBR, LDHC, LDLRAP1, LHX8, LINGO2, LIPG, LMBR1,
LMO1, LRRK2, LUZP2, MASP2, MAST4, MB21D2, MCCC1, MERTK, mir-548, MMP2, MS4A4E, MTG1, MTUS2, MYRIP, NCOA3, NELL1,
NFKB1, NKAIN2, NKAIN3, NMT2, NPHP1, NPR3, NRG3, NSUN3, NSUN6, NUDT13, OCA2, OPHN1, OSBPL1A, OTOL1, PARD3, PDE11A,
PDE4D, PDPN, PDS5B, PDZRN4, PEX5, PHACTR1, phosphate, PKHD1, PLCL1, PLOD2, PLXDC2, PPP2R2B, PPT1, PRKAG2, PRMT6,
PRPF8, PTPN12, PTPN22, PTPRD, PTPRN2, PXDNL, RAB28, RAPGEF2, RAPSN, RIIAG, RIT2, RNF180, RNF19A, ROBO2, SARDII,
SCAPER, SCG3, SEMA6D, SGCZ, SH3RF3, SIL1, SLC22A20, SLC24A3, SLC25A12, SLC37A2, SLC6A3, SLCO3A1, SMOC2, SOD1, SPAG17,
SPRED2, SQSTM1, STAG2, STAM, STXBP5L, SUOX, SUSD1, SYK, SYNE2, TCHH, TDRKH, TEK, TENM2, TFEC, THOP1, THSD7B, TLN2,
TMC1, TNFSF11, TNNI3K, TPST1, TRHDE, TRIM36, TRIM5, TSC22D1, TTC12, TUSC3, UBE2D2, UGGT2, ULK4, UTRN, UVRAG, VAV3,
VAX1, VCAM1, VPS13B, VWC2, WDPCP, WDR27, WWTR1, XK, XKR4, XYLT1, YTIIDC2, ZBTB49, ZFPM2, ZNF608, ZPLD1
>9
ABCA10, ABCA12, ABCA13, ABCA4, ABCB1, ABCC6, ABHD3, ACADS, ACADSB, ACOT7, ACSL4, ACSS2, ADAM23, ADAMTS6, ADCY8,
ADH1C, AGBL4, AGK, AGXT, AHI1, AKAP9, ALDH3A2, ALG8, ALOX5, ANK3, ANKRD30A, ANKRD50, ANKS1B, ANO3, ARHGAP24,
ARHGEF4, ATRX, BBS9, BEND7, BMPR2, BNC2, BRAF, C12orf42, C4orf22, CADM2, CAPN3, CASP8, CASR, CCDC105, CCDC178, CCDC7,
CCSER1, CCT8, CD22, CD28, CD2AP, CDH10, CDH12, CDH13, CDH2, CENPK, CES3, CFH, CNBD1, CNTLN, CNTN5, CNTNAP2,
COL19A1, CPA4, CPNE4, CPNE8, CPXCR1, CRHR1, CRYM, CTNNA3, CTNND2, CTSB, CUBN, CWC27, CXCL13, CYBB, CYP19A1, CYP1A1,
CYP3A5, DAB1, DCC, DDAH1, DDIT4, DHRS2, DISC1, DLD, DLGAP2, DMRTA1, DNAH11, DNAH14, DNAJC13, DNM3, DOCK4, DYM,
DYSF, EGR2, EMB, EN1, EPIIA7, EPIIX1, EPIIX2, ERBB3, ERBB4, ESRRG, EVC, EYS, FAF1, FAM122C, FAM172A, FANCI, FAT4,
FEM1C, FGF14, FOXN3, FOXP2, FRAS1, FSTL4, FUT8, GABRA2, GABRB1, GABRB3, GABRG2, GALNT2, GLRA2, GOLIM4, GPC5, GPR6,
GRID1, GRID2, GRIK2, GRM4, GRM5, GRM8, GTDC1, GYS2, HCN1, HGSNAT, HIVEP1, HMCN1, HMGCR, HMGN5, HSD17B4, HYOU1,
IL15, IL1RAPL1, IL1RAPL2, IQGAP2, ITGA8, ITGAM, ITGAX, ITPR2, JAZF1, KCNE1, KCNH8, KCNN2, KCTD16, KCTD8, KDM6A, KIF26B,
KLIIL3, KLIIL4, KRT6B, KRTAP94, KRTAP99, LALBA, LARS2, LBR, LDIIC, LDLRAP1, LIIX8, LINGO2, LIPG, LMBR1, LMO1, LRRK2,
LUZP2, MASP2, MAST4, MB21D2, MCCC1, MERTK, mir-548, MMP2, MS4A4E, MTG1, MTUS2, MYRIP, NCOA3, NELL1, NFKB1,
NKAIN2, NKAIN3, NMT2, NPHP1, NPR3, NRG3, NSUN3, NSUN6, NUDT13, OCA2, OPHN1, OSBPL1A, OTOLI, PARD3, PDE11A, PDE4D,
PDPN, PDS5B, PDZRN4, PEX5, PHACTR1, phosphate, PKHD1, PLCL1, PLOD2, PLXDC2, PPP2R2B, PPT1, PRKAG2, PRMT6, PRPF8,
PTPN12, PTPN22, PTPRD, PTPRN2, PXDNL, RAB28, RAPGEF2, RAPSN, RHAG, RIT2, RNF180, RNF19A, ROBO2, SARDH, SCAPER, SCG3,
SEMA6D, SGCZ, SH3RF3, SIL1, SLC22A20, SLC24A3, SLC25A12, SLC37A2, SLC6A3, SLCO3A1, SMOC2, SOD1, SPAG17, SPRED2,
SQSTM1, STAG2, STAM, STXBP5L, SUOX, SUSD1, SYK, SYNE2, TCHH, TDRKH, TEK, TENM2, TFEC, THOP1, THSD7B, TLN2, TMC1,
TNFSF11, TNNI3K, TPST1, TRHDE, TRIM36, TRIM5, TSC22D1, TTC12, TUSC3, UBE2D2, UGGT2, ULK4, UTRN, UVRAG, VAV3, VAX1,
VCAM1, VPS13B, VWC2, WDPCP, WDR27, WWTR1, XK, XKR4, XYLT1, YTHDC2, ZBTB49, ZFPM2, ZNF608, ZPLD1
>10
ABCA12, ABCA13, ABCA4, ABCB1, ABCC6, ACSL4, ADAM23, ADAMTS6, ADCY8, AGXT, AKAP9, ALDH5A1, ALOX5, ANK3, ANKRD30A,
ANKS1B, ANO3, ARHGEE4, ATRX, BBS9, BRAF, C12orf42, C4orf22, CADM2, CASP8, CASR, CCDC105, CCDC178, CCDC7, CCSER1, CD22,
CD2AP, CDH10, CDH12, CDH13, CDH2, CENPK, CFH, CNBD1, CNTN5, CNTNAP2, COL19A1, CPA4, CPNE4, CPNE8, CPXCR1, CTNNA3,
CTNND2, CUBN, CYP19A1, DAB1, DCC, DLGAP2, DNAH11, DNAH14, DNAI1, DNM3, DOCK4, DYSF, EMB, EPHA7, ERBB3, ERBB4,
ESRRG, EVC, EYS, FAM184A, FAT4, FOXN3, FRAS1, FSTL4, GABRA2, GABRB1, GABRB3, GMPR, GOLIM4, GPC5, GRID1, GRID2, GRIK2,
GRM4, GRM5, GRM8, GYS2, HCN1, HIVEP1, HMCN1, HTR3B, IL1RAPL2, IQGAP2, ITGA8, ITGAM, ITGAX, ITPR2, KCNE1, KCNH8,
KCTD8, KDM6A, KLHL4, KRTAP94, LALBA, LHX8, LINGO2, LRRK2, LUZP2, MACROD2, MASP2, MAST4, MB21D2, MCCC1, MERTK,
MFSD8, MTUS2, MYRIP, NEK11, NELL1, NKAIN2, NKAIN3, NPHP1, NPR3, NRG3, NSUN6, OCA2, OPHN1, OSCAR, OTOL1, OXGR1,
PAGE4, PDE11A, PDZRN4, PKHD1, PLCL1, PLOD2, PLXDC2, PPARGC1A, PPP1R14C, PROS1, PTPN22, PTPRD, PTPRN2, PXDNL,
RAPGEF2, RIT2, RNF180, ROBO2, SCG3, SGCZ, SH3RF3, SLC24A3, SLCO3A1, SPAG17, SPRED2, STXBP5L, SYK, SYNE2, TCHH, TDRKH,
TEK, TENM2, TFEC, THOP1, THSD7B, TLN2, TMC1, TNFSF11, TNNI3K, TRHDE, TUSC3, UTRN, UVRAG, VAV3, VCAM1, VPS13B,
VWC2, WDR27, XKR4, XYLT1, ZBTB49, ZFPM2, ZNE608, ZPLD1
>11
ABCA10, ABCA12, ABCA13, ABCA4, ABCB1, ABCC6, ACADSB, ACSL4, ACSS2, ADAM23, AGBL4, AGK, AKAP9, ALOX5, ANK3,
ANKRD30A, ANKRD50, ANKS1B, ANO3, ATRX, BBS5, BBS9, BNC2, BRAF, C12orf42, C4orf22, CASP8, CASR, CCDC7, CDH10, CDH12,
CNTN5, CNTNAP2, COL19A1, CTNNA3, CTNND2, CUBN, CYBB, CYP1A1, CYP3A5, DCC, DISC1, DLGAP2, DNAH11, DNAH14, DNAJC13,
DOCK4, DYM, DYSF, EPHA7, ERBB3, ERBB4, EYS, FAT4, FOXP2, FUT8, GABRA2, GABRB1, GABRG2, GIF, GMPR, GRM4, GRM5, GRM8,
GTDC1, HCN1, HMCN1, HMGN5, IL1RAPL1, IMMP2L, ITGAM, ITPR2, KCNH8, KDM6A, KRT6B, LHX8, LINGO2, LRRK2, MAST4, MTG1,
MTUS2, NEK11, NRG3, OPHN1, OXGR1, PAGE4, PARD3, PDE4D, PDS5B, PDZRN4, PKHD1, PLCL1, PPP2R2B, PRKAG2, PROS1, PRPF8,
PTPN22, PTPRD, PTPRN2, PXDNL, RAPGEF2, ROBO2, SCAPER, SEMA6D, SLC24A3, SLC25A12, SLCO3A1, SPRED2, STAG2, STXBP5L,
SUSD1, SYNE2, TCHH, TEK, THOP1, THSD7B, TLN2, TNNI3K, TRHDE, TSC22D1, TUSC3, UGGT2, ULK4, UTRN, UVRAG, VPS13B,
WWTR1, XKR4, YTHDC2, ZFPM2
>12
ABCA10, ABCA12, ABCA13, ABCA4, ABCB1, ABCC6, ACADSB, ACSL4, ACSS2, ADAM23, AGBL4, AGK, AKAP9, ALOX5, ANK3,
ANKRD30A, ANKRD50, ANKS1B, ANO3, ATRX, BBS5, BBSS, BNC2, BRAF, C12orf42, C4orf22, CASP8, CASR, CCDC7, CDH10, CDH12,
CDH13, CDH2, CNTN5, CNTNAP2, COL19A1, CTNNA3, CTNND2, CTSB, CUBN, CYBB, CYT19A1, CYP1A1, CYP3A5, DCC, DISC1,
DLGAP2, DNAH11, DNAH14, DNAJC13, DOCK4, DYM, DYSF, EPHA7, ERBB3, ERBB4, EYS, FAT4, FOXP2, FUT8, GABRA2, GABRB1,
GABRG2, GIF, GMPR, GRM4, GRM5, GRM8, GTDC1, HCN1, HMCN1, HMGN5, IL1RAPL1, IMMP2L, ITGAM, ITGAX, ITPR2, KCNH8,
KDM6A, KRT6B, LHX8, LINGO2, LRRK2, MAST4, MB21D2, MMP2, MTG1, MTUS2, NEK11, NRG3, OPHN1, OXGR1, PAGE4, PARD3,
PDE4D, PDS5B, PDZRN4, PKHD1, PLCL1, PPP2R2B, PRKAG2, PROS1, PRPF8, PTPN22, PTPRD, PTPRN2, PXDNL, RAPGEF2, ROB02,
SCAPER, SEMA6D, SLC24A3, SLC25A12, SLCO3A1, SPRED2, STAG2, STXBP5L, SUSD1, SYNE2, TCHH, TEK, THOP1, THSD7B, TLN2,
TNNI3K, TRHDE, TSC22D1, TUSC3, UGGT2, ULK4, UTRN, UVRAG, VPS13B, WWTR1, XKR4, YTHDC2, ZFPM2
>13
ABCA10, ABCA12, ABCA13, ABCA4, ABCB1, ABCC6, ABHD3, ACADS, ACADSB, ACOT7, ACSL4, ACSS2, ADAM23, ADAMTS6, ADCY8,
adenosinetriphosphate, ADGRB3, ADGRV1, ADH1C, AGBL4, AGK, AGXT, AHI1, AKAP9, ALDH3A2, ALDH5A1, ALG8, ALOX5, ANK3,
ANKRD30A, ANKRD50, ANKS1B, ANO3, ARHGAP24, ARHGEF4, ATRX, BBS5, BBS9, BEND7, BMPR2, BNC2, BOD1, BRAF, C12orf42,
C4orf22, CADM2, CAMKMT, CAPN3, CASP8, CASR, CCDC105, CCDC137, CCDC178, CCDC7, CCSER1, CCT8, CD22, CD28, CD2AP, CDH10,
CDH12, CDH13, CDH2, CENPK, CES3, CFH, CHRNA7, CLN3, CNBD1, CNTLN, CNTN5, CNTNAP2, COL19A1, CPA4, CPNE4, CPNE8,
CPXCR1, CRHR1, CRYM, CTNNA3, CTNND2, CTSB, CUBN, CWC27, CXCL13, CYBB, CYP19A1, CYP1A1, CYP3A5, DAB1, DCC, DDAH1,
DDIT4, DHRS2, DISC1, DLD, DLEU1, DLGAP2, DMRTA1, DNAH11, DNAH14, DNAI1, DNAJC13, DNM3, DOCK4, DYM, DYSF, EGR2,
EMB, EN1, EPHA7, EPHX1, EPHX2, ERBB3, ERBB4, ESRRG, EVC, EYS, FAF1, FAM122C, FAM172A, FAM184A, FANCI, FAT4, FEM1C,
FGF14, FOXN3, FOXP2, FRAS1, FSTL4, FUT8, GABRA2, GABRB1, GABRB3, GABRG2, GALNT2, GIF, GLRA2, GMPR, GOLIM4, GPC5,
GPR6, GRID1, GRID2, GRIK2, GRM4, GRM5, GRM8, GSTM2, GTDC1, GYS2, HCN1, HGSNAT, HIVEP1, HMCN1, HMGCR, HMGN5, HPGD,
HSD17B4, HTR3B, HYOU1, ICOS, IL15, IL1RAPL1, IL1RAPL2, IMMP2L, IQGAP2, ITGA8, ITGAM, ITGAX, ITPR2, JAZF1, KCNE1,
KCNH8, KCNN2, KCTD16, KCTD8, KDM6A, KIF26B, KLHL3, KLHL4, KRT6B, KRTAP92, KRTAP94, KRTAP98, KRTAP99, LALBA, LARS2,
LBR, LDHC, LDLRAP1, LHX8, LINGO2, LIPG, LMBR1, LMO1, LRRK2, LUZP2, MACROD2, MASP2, MAST4, MB21D2, MCCC1, MERTK,
MFSD8, mir-548, MMP2, MS4A4E, MTG1, MTUS2, MYRIP, NCOA3, NEK11, NELL1, NFKB1, NKAIN2, NKAIN3, NMT2, NPHP1, NPR3,
NRG3, NSUN3, NSUN6, NUDT13, OCA2, OPHN1, OSBPL1A, OSCAR, OTOL1, OXGR1, PAGE4, PARD3, PDE11A, PDE4D, PDPN, PDS5B,
PDZRN4, PEX5, PHACTR1, phosphate, PKHD1, PLCL1, PLOD2, PLXDC2, PPARGC1A, PPP1R14C, PPP2R2B, PPT1, PRKAG2, PRMT6,
PROS1, PRPF8, PTPN12, PTPN22, PTPRD, PTPRN2, PVT1, PXDNL, RAB28, RAPGEF2, RAPSN, RHAG, RIT2, RNF180, RNF19A, ROBO2,
RPL11, SARDH, SCAPER, SCG3, SEMA6D, SGCZ, SH3RF3, SIL1, SLC22A20, SLC24A3, SLC25A12, SLC37A2, SLC6A3, SLCO3A1, SMOC2,
SOD1, SPAG17, SPRED2, SQSTM1, STAG2, STAM, STXBP5L, SUOX, SUSD1, SYK, SYNE2, TCHH, TDRKH, TEK, TENM2, TFEC, THOP1,
THSD7B, TLN2, TMC1, TNFSF11, TNNI3K, TPST1, TEHDE, TRIM36, TRIM5, TSC22D1, TTC12, TUSC3, UBE2D2, UGGT2, ULK4, UTRN,
UVRAG, VAV3, VAX1, VCAM1, VPS13B, VWC2, WDPCP, WDR27, WWTR1, XK, XKR4, XYLT1, YTHDC2, ZBTB49, ZFPM2, ZNF608, ZPLD1
>14
ABCA12, ABCA13, ABCA4, ABCB1, ABCC6, ACSL4, ADAM23, ADAMTS6, ADCY8, ADGRV1, AGXT, AKAP9, ALDH5A1, ALOX5, ANK3,
ANKRD30A, ANKS1B, ANO3, ARHGEF4, ATRX, BBS9, BRAF, C12orf42, C4orf22, CADM2, CASP8, CASR, CCDC105, CCDC178, CCDC7,
CCSER1, CD22, CD2AP, CDH10, CDH12, CDH13, CDH2, CENPK, CFH, CNBD1, CNTN5, CNTNAP2, COL19A1, CPA4, CPNE4, CPNE8,
CPXCR1, CTNNA3, CTNND2, CUBN, CYP19A1, DAB1, DCC, DLGAP2, DMRTA1, DNAH11, DNAH14, DNAI1, DNM3, DOCK4, DYSF, EMB,
EPHA7, ERBB3, ERBB4, ESRRG, EVC, EYS, FAM184A, FAT4, FGF14, FOXN3, FRAS1, FSTL4, GABRA2, GABRB1, GABRB3, GABRG2,
GMPR, GOLIM4, GPC5, GRID1, GRID2, GRIK2, GRM4, GRM5, GRM8, GYS2, HCN1, HIVEP1, HMCN1, HTR3B, IL1RAPL2, IQGAP2,
ITGA8, ITGAM, ITGAX, ITPR2, KCNE1, KCNH8, KCTD8, KDM6A, KLHL4, KRTAP94, LALBA, LHX8, LINGO2, LRRK2, LUZP2, MACROD2,
MASP2, MAST4, MB21D2, MCCC1, MERTK, MFSD8, MMP2, MTUS2, MYRIP, NEK11, NELL1, NKAIN2, NKAIN3, NPHP1, NPR3, NRG3,
NSUN6, OCA2, OPHN1, OSBPL1A, OSCAR, OTOL1, OXGR1, PAGE4, PDE11A, PDE4D, PDZRN4, PKHD1, PLCL1, PLOD2, PLXDC2,
PPARGC1A, PPP1R14C, PROS1, PTPN22, PTPRD, PTPRN2, PXDNL, RAPGEF2, RIT2, RNF180, ROBO2, SCG3, SGCZ, SH3RF3, SLC24A3,
SLCO3A1, SPAG17, SPRED2, STXBP5L, SYK, SYNE2, TCHH, TDRKH, TEK, TENM2, TFEC, THOP1, THSD7B, TLN2, TMC1, TNFSF11,
TNNI3K, TRHDE, TUSC3, LILK4, UTRN, UVRAG, VAV3, VCAM1, VPS13B, VWC2, WDPCP, WDR27, XKR4, XYLT1, ZBTB49, ZFPM2,
ZNF608, ZPLD1
>15
ABCA10, ABCA12, ABCA13, ABCA4, ABCB1, ABCC6, ABIID3, ACADS, ACADSB, ACOT7, ACSL4, ACSS2, ADAM23, ADAMTS6, ADCY8,
AGBL4, AGXT, AHI1, AKAP9, ALDH3A2, ALG8, ALOX5, ANK3, ANKRD30A, ANKRD50, ANKS1B, ANO3, ARHGAP24, ARHGEF4, ATRX,
BBS9, BEND7, BMPR2, BNC2, BRAF, C12orf42, C4orf22, CAPN3, CASP8, CASR, CCDC105, CCDC178, CCDC7, CCSER1, CCT8, CD22,
CD28, CD2AP, CDH10, CDH12, CDH13, CDH2, CENPK, CES3, CFH, CNBD1, CNTLN, CNTN5, CNTNAP2, COL19A1, CPA4, CPNE4,
CPNE8, CRIIR1, CTNNA3, CTNND2, CTSB, CUBN, CWC27, CXCL13, CYBB, CYP19A1, CYP3A5, DAB1, DCC, DDIT4, DISC1, DLD,
DLGAP2, DMRTA1, DNAH11, DNAH14, DNAJC13, DNM3, DOCK4, DYM, DYSF, EGR2, EN1, EPHA7, EPHX1, EPHX2, ERBB3, ERBB4,
EVC, EYS, FAM122C, FAM172A, FANCI, FAT4, FEM1C, FGF14, FOXN3, FOXP2, FRAS1, FSTL4, FUT8, GABRA2, GABRB3, GALNT2,
GPC5, GPR6, GRID1, GRID2, GRIK2, GRM4, GRM5, GRM8, GTDC1, GYS2, HCN1, HGSNAT, HIVEP1, HMCN1, HMGCR, HMGN5,
IISD17B4, IIYOU1, IL15, IL1RAPL2, IQGAP2, ITGA8, ITGAM, ITGAX, ITPR2, JAZF1, KCNE1, KCNII8, KCTD16, KCTD8, KDM6A, KIF26B,
KRT6B, KRTAP99, LALBA, LARS2, LDHC, LDLRAP1, LHX8, LINGO2, LIPG, LRRK2, MASP2, MAST4, MB21D2, MCCC1, MERTK, mir-548,
MMP2, MTG1, MTUS2, MYRIP, NCOA3, NELL1, NFKB1, NMT2, NPHP1, NPR3, NRG3, NSUN3, NSUN6, OCA2, OPHN1, OSBPL1A,
OTOL1, PARD3, PDE11A, PDE4D, PDPN, PDS5B, PDZRN4, PEX5, PHACTR1, phosphate, PKHD1, PLCL1, PLOD2, PLXDC2, PPP2R2B,
PPT1, PRKAG2, PRMTG, PTPN12, PTPRD, PTPRN2, PXDNL, RAB28, RAPGEF2, RAPSN, RIIAG, RNF180, RNF19A, ROBO2, SARDII,
SCAPER, SEMA6D, SGCZ, SH3RF3, SIL1, SLC22A20, SLC24A3, SLC25A12, SLC37A2, SLC6A3, SLCO3A1, SMOC2, SPAG17, SPRED2,
SQSTM1, STAG2, STAM, STXBP5L, SUSD1, SYK, SYNE2, TCHH, TDRKH, TEK, TENM2, TFEC, THOP1, THSD7B, TLN2, TMC1, TNFSF11,
TNNI3K, TPST1, TRHDE, TRIM5, TSC22D1, TTC12, TUSC3, UBE2D2, UGGT2, ULK4, UTRN, UVRAG, VAV3, VAX1, VCAM1, VPS13B,
VWC2, WDPCP, WDR27, WWTR1, XK, XKR4, XYLT1, YTIIDC2, ZFPM2, ZNF608, ZPLD1
>16
ABCA12, ABCA13, ABCA4, ABCB1, ABCC6, ACSL4, ADAM23, ADAMTS6, ADCY8, AGXT, AKAP9, ALDH5A1, ALOX5, ANK3, ANKRD30A,
ANKS1B, ANO3, ARHGEF4, ATRX, BBS9, BRAF, C12orf42, C4orf22, CADM2, CASP8, CASR, CCDC105, CCDC178, CCDC7, CCSER1, CD22,
CD2AP, CDH10, CDH12, CDH13, CDH2, CENPK, CFH, CLN3, CNBD1, CNTN5, CNTNAP2, COL19A1, CPA4, CPNE4, CPNE8, CPXCR1
CTNNA3, CTNND2, CUBN, CXCL13, CYP19A1, DAB1, DCC, DLGAP2, DNAH11, DNAH14, DNAI1, DNM3, DOCK4, DYSF, EMB, EPHA7,
ERBB3, ERBB4, ESRRG, EVC, EYS, FAM184A, FAT4, FOXN3, FRAS1, FSTL4, FUT8, GABRA2, GABRB1, GABRB3, GMPR, GOLIM4, GPC5,
GRID1, GRID2, GRIK2, GRM4, GRM5, GRM8, GTDC1, GYS2, HCN1, HIVEP1, HMCN1, HTR3B, IL15, IL1RAPL2, IQGAP2, ITGA8, ITGAM,
ITGAX, ITPR2, JAZF1, KCNE1, KCNH8, KCTD8, KDM6A, KIF26B, KLHL4, KRTAP94, LALBA, LHX8, LINGO2, LRRK2, LUZP2,
MACROD2, MASP2, MAST4, MB21D2, MCCC1, MERTK, MFSD8, MTUS2, MYRIP, NEK11, NELL1, NKAIN2, NKAIN3, NPHP1, NPR3,
NRG3, NSUN6, OCA2, OPHN1, OSCAR, OTOL1, OXGR1, PAGE4, PDE11A, PDZRN4, PKHD1, PLCL1, PLOD2, PLXDC2, PPARGC1A,
PPP1R14C, PROS1, PTPN22, PTPRD, PTPRN2, PXDNL, RAPGEF2, RIT2, RNF180, ROBO2, SCG3, SGCZ, SH3RF3, SLC24A3, SLCO3A1,
SOD1, SPAG17, SPRED2, STXBP5L, SYK, SYNE2, TCHH, TDRKH, TEK, TENM2, TFEC, THOP1, THSD7B, TLN2, TMC1, TNFSF11,
TNNI3K, TRHDE, TUSC3, UTRN, UVRAG, VAV3, VCAM1, VPS13B, VWC2, WDR27, XKR4, XYLT1, ZBTB49, ZFPM2, ZNF608, ZPLD1
>17
ABCA10, ABCA12, ABCA13, ABCA4, ABCB1, ABCC6, ABHD3, ACADS, ACADSB, ACOT7, ACSL4, ACSS2, ADAM23, ADAMTS6, ADCY8,
AGBL4, AGXT, AHI1, AKAP9, ALDH3A2, ALG8, ALOX5, ANK3, ANKRD30A, ANKRD50, ANKS1B, ANO3, ARHGAP24, ARHGEF4, ATRX,
BBS9, BEND7, BMPR2, BNC2, BRAF, C12orf42, C4orf22, CAPN3, CASP8, CASR, CCDC105, CCDC178, CCDC7, CCSER1, CCT8, CD22,
CD28, CD2AP, CDH10, CDH12, CDH13, CDH2, CENPK, CES3, CFH, CNBD1, CNTLN, CNTN5, CNTNAP2, COL19A1, CPA4, CPNE4,
CPNE8, CRHR1, CTNNA3, CTNND2, CTSB, CUBN, CWC27, CXCL13, CYBB, CYP19A1, CYP3A5, DAB1, DCC, DDIT4, DISC1, DLD,
DLGAP2, DMRTA1, DNAH11, DNAH14, DNAJC13, DNM3, DOCK4, DYM, DYSF, EGR2, EN1, EPHA7, EPHX1, EPHX2, ERBB3, ERBB4,
EVC, EYS, FAM122C, FAM172A, FANCI, FAT4, FEM1C, FGF14, FOXN3, FOXP2, FRAS1, FSTL4, FUT8, GABRA2, GABRB3, GALNT2,
GPC5, GPR6, GRID1, GRID2, GRIK2, GRM4, GRM5, GRM8, GTDC1, GYS2, HCN1, HGSNAT, HIVEP1, HMCN1, HMGCR, HMGN5, HPGD,
HSD17B4, HYOU1, IL15, IL1RAPL2, IQGAP2, ITGA8, ITGAM, ITGAX, ITPR2, JAZF1, KCNE1, KCNH8, KCTD16, KCTD8, KDM6A, KIF26B,
KRT6B, KRTAP9-9, LALBA, LARS2, LDHC, LDLRAP1, LHX8, LINGO2, LIPG, LRRK2, MASP2, MAST4, MB21D2, MCCC1, MERTK,
mir-548, MMP2, MTG1, MTUS2, MYRIP, NCOA3, NELL1, NFKB1, NMT2, NPHP1, NPR3, NRG3, NSUN3, NSUN6, OCA2, OPHN1,
OSBPL1A, OTOL1, PARD3, PDE11A, PDE4D, PDPN, PDS5B, PDZRN4, PEX5, PHACTR1, phosphate, PKHD1, PLCL1, PLOD2, PLXDC2,
PPP2R2B, PPT1, PRKAG2, PRMT6, PTPN12, PTPRD, PTPRN2, PXDNL, RAB28, RAPGEF2, RAPSN, RHAG, RNF180, RNF19A, ROBO2,
SARDH, SCAPER, SEMA6D, SGCZ, SH3RF3, SIL1, SLC22A20, SLC24A3, SLC25A12, SLC37A2, SLC6A3, SLCO3A1, SMOC2, SPAG17,
SPRED2, SQSTM1, STAG2, STAM, STXBP5L, SUSD1, SYK, SYNE2, TCHH, TDRKH, TEK, TENM2, TFEC, THOP1, THSD7B, TLN2, TMC1,
TNFSF11, TNNI3K, TPST1, TRHDE, TRIM5, TSC22D1, TTC12, TUSC3, UBE2D2, UGGT2, ULK4, UTRN, UVRAG, VAV3, VAX1, VCAM1,
VPS13B, VWC2, WDPCP, WDR27, WWTR1, XK, XKR4, XYLT1, YTHDC2, ZFPM2, ZNF608, ZPLD1
>18
ABCA12, ABCA13, ABCA4, ABCB1, ABCC6, ACSL4, ADAM23, ADAMTS6, ADCY8, AGXT, AKAP9, ALDH5A1, ALOX5, ANK3, ANKRD30A,
ANKS1B, ANO3, ARHGEF4, ATRX, BBS9, BRAF, C12orf42, C4orf22, CADM2, CASP8, CASR, CCDC105, CCDC178, CCDC7, CCSER1, CD22,
CD2AP, CDH10, CDH12, CDH13, CDH2, CENPK, CFH, CLN3, CNBD1, CNTN5, CNTNAP2, COL19A1, CPA4, CPNE4, CPNE8, CPXCR1,
CTNNA3, CTNND2, CUBN, CXCL13, CYP19A1, DAB1, DCC, DLGAP2, DNAH11, DNAH14, DNAI1, DNM3, DOCK4, DYSF, EMB, EPHA7,
ERBB3, ERBB4, ESRRG, EVC, EYS, FAM184A, FAT4, FOXN3, FRAS1, FSTL4, FUT8, GABRA2, GABRB1, GABRB3, GMPR, GOLIM4, GPC5,
GRID1, GRID2, GRIK2, GRM4, GRM5, GRM8, GTDC1, GYS2, HCN1, HIVEP1, HMCN1, HTR3B, IL15, IL1RAPL2, IQGAP2, ITGA8, ITGAM,
ITGAX, ITPR2, JAZF1, KCNE1, KCNH8, KCTD8, KDM6A, KIF26B, KLHL4, KRTAP9-4, LALBA, LHX8, LINGO2, LRRK2, LUZP2,
MACROD2, MASP2, MAST4, MB21D2, MCCC1, MERTK, MFSD8, MMP2, MTUS2, MYRIP, NEK11, NELL1, NKAIN2, NKAIN3, NPHP1,
NPR3, NRG3, NSUN6, OCA2, OPHN1, OSCAR, OTOL1, OXGR1, PAGE4, PDE11A, PDZRN4, PKHD1, PLCL1, PLOD2, PLXDC2, PPARGC1A,
PPP1R14C, PROS1, PTPN22, PTPRD, PTPRN2, PXDNL, RAPGEF2, RIT2, RNF180, ROBO2, SCG3, SGCZ, SH3RF3, SLC24A3, SLCO3A1,
SOD1, SPAG17, SPRED2, STXBP5L, SYK, SYNE2, TCHH, TDRKH, TEK, TENM2, TFEC, THOP1, THSD7B, TLN2, TMC1, TNFSF11,
TNNI3K, TRHDE, TUSC3, UTRN, UVRAG, VAV3, VCAM1, VPS13B, VWC2, WDR27, XKR4, XYLT1, ZBTB49, ZFPM2, ZNF608, ZPLD1
>19
ABCA10, ABCA12, ABCA13, ABCA4, ABCB1, ABCC6, ABHD3, ACADS, ACADSB, ACOT7, ACSL4, ACSS2, ADAM23, ADAMTS6, ADCY8,
ADH1C, AGBL4, AGK, AGXT, AHI1, AKAP9, ALDH3A2, ALDH5A1, ALG8, ALOX5, ANK3, ANKHD30A, ANKRD50, ANKS1B, ANO3,
ARHGAP24, ARHGEF4, ATRX, BBS5, BBS9, BEND7, BMPR2, BNC2, BRAF, C12orf42, C4orf22, CADM2, CAPN3, CASP8, CASR, CCDC105,
CCDC178, CCDC7, CCSER1, CCT8, CD22, CD28, CD2AP, CDH10, CDH12, CDH13, CDH2, CENPK, CES3, CFH, CNBD1, CNTLN, CNTN5,
CNTNAP2, COL19A1, CPA4, CPNE4, CPNE8, CPXCR1, CKHR1, CRYM, CTNNA3, CTNND2, CTSB, CUBN, CWC27, CYBB, CYP19A1,
CYP1A1, CYP3A5, DAB1, DCC, DDAH1, DDIT4, DHRS2, DISC1, DLD, DLGAP2, DMRTA1, DNAH11, DNAH14, DNAJC13, DNM3, DOCK4,
DYM, DYSF, EGR2, EMB, EN1, EPHA7, EPHX1, EPHX2, ERBB3, ERBB4, ESRRG, EVC, EYS, FAF1, FAM122C, FAM172A, FAM184A,
FANCI, FAT4, FEM1C, FGF14, FOXN3, FOXP2, FRAS1, FSTL4, FUT8, GABRA2, GABRB1, GABRB3, GABRG2, GALNT2, GIF, GLRA2,
GMPR, GOLIM4, GPC5, GPR6, GRID1, GRID2, GRIK2, GRM4, GRM5, GRM8, GTDC1, GYS2, HCN1, HGSNAT, HIVEP1, HMCN1, HMGCR,
HMGN5, HPGD, HSD17B4, HYAL1, HYOU1, ICOS, IL15, IL1RAPL1, IL1RAPL2, IMMP2L, IQGAP2, ITGA8, ITGAM, ITGAX, ITPR2, JAZF1,
KCNE1, KCNH8, KCNN2, KCTD16, KCTD8, KDM6A, KIF26B, KLHL3, KLHL4, KRT6B, KRTAP9-4, KRTAP9-8, KRTAP9-9, LALBA, LARS2,
LBR, LDHC, LDLRAP1, LHX8, LINGO2, LIPG, LMBB1, LMO1, LRRK2, LUZP2, MASP2, MAST4, MB21D2, MCCC1, MERTK, mir-548,
MMP2, MS4A4E, MTG1, MTUS2, MYBIP, NCOA3, NEK11, NELL1, NFKB1, NKAIN2, NKAIN3, NMT2, NPHP1, NPR3, NRG3, NSUN3,
NSUN6, NUDT13, OCA2, OPHN1, OSBPL1A, OTOL1, OXGR1, PAGE4, PARD3, PDE11A, PDE4D, PDPN, PDS5B, PDZRN4, PEX5, PHACTR1,
phosphate, PKHD1, PLCL1, PLOD2, PLXDC2, PPP2R2B, PPT1, PRKAG2, PRMT6, PROS1, PRPF8, PTPN12, PTPN22, PTPRD, PTPRN2,
PXDNL, RAB28, RAPGEF2, RAPSN, RHAG, RIT2, RNF180, RNF19A, ROBO2, RPL11, SARDH, SCAPER, SCG3, SEMA6D, SGCZ, SH3RF3,
SIL1, SLC22A20, SLC24A3, SLC25A12, SLC37A2, SLC6A3, SLCO3A1, SMOC2, SOD1, SPAG17, SPRED2, SQSTM1, STAG2, STAM, STXBP5L,
SUOX, SUSD1, SYK, SYNE2, TCHH, TDRKH, TEK, TENM2, TFEC, THOP1, THSD7B, TLN2, TMC1, TNFSF11, TNNI3K, TPST1, TRHDE,
TRIM36, TRIM5, TSC22D1, TTC12 TUSC3, UBE2D2, UGGT2, ULK4, UTRN, UVRAG, VAV3, VAX1, VCAM1, VPS13B, VWC2, WDPCP,
WDR27, WWTR1, XK, XKR4, XYLT1, YTHDC2, ZBTB49, ZFPM2, ZNF608, ZPLD1
>20
ABCA10, ABCA12, ABCA13, ABCA4, ABCB1, ABCC6, ABHD3, ACADS, ACADSB, ACOT7, ACSL4, ACSS2, ADAM23, ADAMTS6, ADCY8,
adenosinetriphosphate, ADGRB3, ADGRL2, ADGRV1, ADH1C, AGBL4, AGK, AGXT, AHI1, AKAP9, ALDH3A2, ALDH5A1, ALG8, ALOX5,
ANK3, ANKRD30A, ANKED50, ANKS1B, ANO3, ARHGAP24, ARHGEF4, ATRX, BBS5, BBSS, BEND7, BMPR2, BNC2, BOD1, BRAF,
C12orf42, C4orf22, CADM2, CAMKMT, CAPN3, CASP8, CASR, CCDC105, CCDC137, CCDC178, CCDC7, CCSER1, CCT8, CD22, CD28,
CD2AP, CDH10, CDH12, CDH13, CDH2, CENPK, CES3, CFH, CHRNA7, CLN3, CNBD1, CNTLN, CNTN5, CNTNAP2, COL19A1, CPA4,
CPNE4, CPNE8, CPXCR1, CRHR1, CRYM, CTNNA3, CTNND2, CTSB, CUBN, CWC27, CXCL13, CYBB, CYP19A1, CYP1A1, CYP3A5, DAB1,
DCC, DDAH1, DDIT4, DHRS2, DISCI, DLD, DLEU1, DLGAP2, DMRTA1, DNAH11, DNAH14, DNAI1, DNAJC13, DNM3, DOCK4, DYM,
DYSF, EGR2, EMB, EN1, EPHA7, EPHX1, EPHX2, ERBB3, ERBB4, ESRRG, EVC, EYS, FAF1, FAM122C, FAM172A, FAM184A, FANCI,
FAT4, FEM1C, FGF14, FOXN3, FOXP2, FRAS1, FSTL4, FUT8, GABRA2, GABRB1, GABRB3, GABRG2, GALNT2, GIF, GLRA2, GMPR,
GOLIM4, GPC5, GPR6, GRID1, GRID2, GRIK2, GRM4, GRM5, GRM8, GSTM2, GTDC1, GYS2, HCN1, HGSNAT, HIVEP1, HMCN1, HMGCR,
HMGN5, HPGD, HSD17B4, HTR3B, HYOU1, ICOS, IL15, IL1RAPL1, IL1RAPL2, IMMP2L, IQGAP2, ITGA8, ITGAM, ITGAX, ITPR2, JAZF1,
KCNE1, KCNH8, KCNN2, KCTD16, KCTD8, KDM6A, KIF26B, KLHL3, KLHL4, KRT6B, KRTAP9-2, KRTAP9-4, KRTAP9-8, KRTAP9-9,
LALBA, LARS2, LBR, LDIIC, LDLRAP1, LIIX8, LINGO2, LIPG, LMBR1, LMO1, LRRK2, LUZP2, MACROD2, MASP2, MAST4, MB21D2,
MCCC1, MERTK, MFSD8, mir-548, MMP2, MS4A4E, MTG1, MTUS2, MYRIP, NCOA3, NEK11, NELL1, NFKB1, NKAIN2, NKAIN3, NMT2,
NPHP1, NPR3, NRG3, NSUN3, NSUN6, NUDT13, OCA2, OPHN1, OSBPL1A, OSCAR, OTOL1, OXGR1, PAGE4, PARD3, PDE11A, PDE4D,
PDPN, PDS5B, PDZRN4, PEX5, PHACTR1, phosphate, PKHD1, PLCL1, PLOD2, PLXDC2, PPARGC1A, PPP1R14C, PPP2R2B, PPT1, PRKAG2,
PRMT6, PROS1, PRPF8, PTPN12, PTPN22, PTPRD, PTPRN2, PVT1, PXDNL, RAB28, RAPGEF2, RAPSN, RIIAG, RIT2, RNF180, RNF19A,
ROBO2, RPL11, SARDH, SCAPER, SCG3, SEMA6D, SGCZ, SH3RF3, SIL1, SLC22A20, SLC24A3, SLC25A12, SLC37A2, SLC6A3, SLCO3A1,
SMOC2, SOD1, SPAG17, SPRED2, SQSTM1, STAG2, STAM, STXBP5L, SUOX, SUSD1, SYK, SYNE2, TCHH, TDRKH, TEK, TENM2, TFEC,
THOP1, THSD7B, TLN2, TMC1, TNFSF11, TNNI3K, TPST1, TRHDE, TRIM36, TRIM5, TSC22D1, TTC12, TUSC3, UBE2D2, UGGT2, ULK4,
UTRN, UVRAG, VAV3, VAX1, VCAM1, VPS13B, VWC2, WDPCP, WDR27, WWTR1, XK, XKR4, XYLT1, YTIIDC2, ZBTB49, ZFPM2, ZNF608,
ZPLD1
>21
ABCA10, ABCA12, ABCA13, ABCA4, ABCB1, ABCC6, ACADSB, ACSL4, ACSS2, ADAM23, AGBL4, AGK, AKAP9, ALOX5, ANK3,
ANKRD30A, ANKRD50, ANKS1B, ANO3, ATRX, BBS5, BBS9, BNC2, BRAF, C12orf42, C4orf22, CASP8, CASR, CCDC7, CDII10, CDII12,
CDH13, CNTN5, CNTNAP2, COL19A1, CTNNA3, CTNND2, CUBN, CYBB, CYP19A1, CYP1A1, CYP3A5, DCC, DISC1, DLGAP2, DNAH11,
DNAH14, DNAJC13, DOCK4, DYM, DYSF, EPHA7, ERBB3, ERBB4, EYS, FAT4, FOXP2, FUT8, GABRA2, GABRB1, GABRG2, GIF, GMPR,
GRM4, GRM5, GRM8, GTDC1, HCN1, HMCN1, HMGN5, IL1RAPL1, IMMP2L, ITGAM, ITPR2, KCNH8, KDM6A, KRT6B, LHX8, LINGO2,
LRRK2, MAST4, MMP2, MTG1, MTUS2, NEK11, NRG3, OPIIN1, OXGR1, PAGE4, PARD3, PDE4D, PDS5B, PDZRN4, PKIID1, PLCL1,
PPP2R2B, PRKAG2, PROS1, PRPF8, PTPN22, PTPRD, PTPRN2, PXDNL, RAPGEF2, ROBO2, SCAPER, SEMA6D, SLC24A3, SLC25A12,
SLCO3A1, SPRED2, STAG2, STXBP5L, SUSD1, SYNE2, TCHH, TEK, THOP1, THSD7B, TLN2, TNNI3K, TRHDE, TSC22D1, TUSC3, UGGT2,
ULK4, UTRN, UVRAG, VPS13B, WWTR1, XKR4, XYLT1, YTHDC2, ZFPM2
>22
ABCA10, ABCA12, ABCA13, ABCA4, ABCB1, ABCC6, ABHD3, ACADS, ACADSB, ACOT7, ACSL4, ACSS2, ADAM23, ADAMTS6, ADCY8,
AGBL4, AGXT, AHI1, AKAP9, ALDH3A2, ALG8, ALOX5, ANK3, ANKRD30A, ANKRD50, ANKS1B, ARHGAP24, ARHGEF4, ATRX, BBS9,
BMPR2, BNC2, BRAF, C12orf42, C4orf22, CAPN3, CASP8, CASR, CCDC105, CCDC178, CCDC7, CCSER1, CCT8, CD22, CD28, CD2AP,
CDH10, CDH12, CDH13, CDH2, CENPK, CES3, CFH, CNBD1, CNTLN, CNTN5, CNTNAP2, COL19A1, CPA4, CPNE4, CPNE8, CTNNA3,
CTNND2, CTSB, CUBN, CWC27, CYBB, CYP19A1, CYP3A5, DAB1, DCC, DDIT4, DISC1, DLD, DLGAP2, DMRTA1, DNAH11, DNAH14,
DNAJC13, DNM3, DOCK4, DYM, DYSF, EGR2, EN1, EPHA7, EPHX1, EPHX2, ERBB3, ERBB4, EVC, EYS, FAM122C, FAM172A, FANCI,
FAT4, FEM1C, FGF14, FOXN3, FOXP2, FRAS1, FSTL4, FUT8, GABRA2, GABRB3, GALNT2, GPC5, GPR6, GRID1, GRID2, GRIK2, GRM4,
GRM5, GRM8, GTDC1, GYS2, HCN1, HGSNAT, HIVEP1, HMCN1, HMGCR, HMGN5, HPGD, HSD17B4, HYOU1, IL15, IL1RAPL2, IQGAP2,
ITGA8, ITGAM, ITGAX, ITPR2, JAZF1, KCNE1, KCNH8, KCTD16, KCTD8, KDM6A, KIF26B, KRT6B, KRTAP9-9, LALBA, LARS2, LDHC,
LDLRAP1, LHX8, LINGO2, LIPG, LRRK2, MASP2, MAST4, MB21D2, MCCC1, MERTK, mir-548, MMP2, MTG1, MTUS2, MYRIP, NCOA3,
NELL1, NMT2, NPHP1, NPR3, NRG3, NSUN3, NSUN6, OCA2, OSBPL1A, OTOL1, PARD3, PDE11A, PDE4D, PDPN, PDS5B, PDZRN4,
PEX5, PHACTR1, phosphate, PKHD1, PLCL1, PLOD2, PLXDC2, PPP2R2B, PPT1, PRKAG2, PRMT6, PTPN12, PTPRD, PTPRN2, PXDNL,
RAB28, RAPGEF2, RAPSN, RHAG, RNF180, RNF19A, ROBO2, SARDH, SCAPER, SH3RF3, SIL1, SLC22A20, SLC24A3, SLC25A12, SLC37A2,
SLCO3A1, SMOC2, SPAG17, SPRED2, SQSTM1, STAG2, STAM, STXBP5L, SUSD1, SYK, SYNE2, TCHH, TEK, TENM2, TFEC, THOP1,
THSD7B, TLN2, TMC1, TNFSF11, TNN13K, TPST1, TRHDE, TRIM5, TSC22D1, TTC12, UBE2D2, UGGT2, ULK4, UTRN, UVRAG, VAV3,
VAX1, VCAM1, VPS13B, VWC2, WDPCP, WDR27, WWTR1, XK, XKR4, XYLT1, YTHDC2, ZFPM2, ZNF608, ZPLD1
>23
ABCA10, ABCA12, ABCA13, ABCA4, ABCB1, ABCC6, ABHD3, ACADS, ACADSB, ACOT7, ACSL4, ACSS2, ADAM23, ADAMTS6, ADCY8,
AGBL4, AGXT, AHI1, AKAP9, ALDH3A2, ALG8, ALOX5, ANK3, ANKRD30A, ANKRD50, ANKS1B, ARHGAP24, ARHGEF4, ATRX, BBS9,
BMPR2, BNC2, BRAF, C12orf42, C4orf22, CAPN3, CASP8, CASR, CCDC105, CCDC178, CCDC7, CCSER1, CCT8, CD22, CD28, CD2AP,
CDH10, CDH12, CDH13, CDH2, CENPK, CES3, CFH, CNBD1, CNTLN, CNTN5, CNTNAP2, COL19A1, CPA4, CPNE4, CPNE8, CTNNA3,
CTNND2, CTSB, CUBN, CWC27, CYBB, CYP19A1, CYP3A5, DAB1, DCC, DDIT4, DISC1, DLD, DLGAP2, DMRTA1, DNAH11, DNAH14,
DNAJC13, DNM3, DOCK4, DYM, DYSF, EGR2, EN1, EPHA7, EPHX1, EPHX2, ERBB3, ERBB4, EVC, EYS, FAM122C, FAM172A, FANCI,
FAT4, FEM1C, FGF14, FOXN3, FOXP2, FRAS1, FSTL4, FUT8, GABRA2, GABRB3, GALNT2, GPC5, GPR6, GRID1, GRID2, GRIK2, GRM4,
GRM5, GRM8, GTDC1, GYS2, HCN1, HGSNAT, HIVEP1, HMCN1, HMGCR, HMGN5, HPGD, HSD17B4, HYOU1, IL15, IL1RAPL2, IQGAP2,
ITGA8, ITGAM, ITGAX, ITPR2, JAZF1, KCNE1, KCNH8, KCTD16, KCTD8, KDM6A, KIF26B, KRT6B, KRTAP9-9, LALBA, LARS2, LDHC,
LDLRAP1, LHX8, LINGO2, LIPG, LRRK2, MASP2, MAST4, MB21D2, MCCC1, MERTK, mir-548, MMP2, MTG1,
MTUS2, MYRIP, NCOA3, NELL1, NMT2, NPHP1, NPR3, NRG3, NSUN3, NSUN6, OCA2, OSBPL1A, OTOL1, PARD3, PDE11A, PDE4D,
PDPN, PDS5B, PDZRN4, PEX5, PHACTR1, phosphate, PKHD1, PLCL1, PLOD2, PLXDC2, PPP2R2B, PPT1, PRKAG2, PRMT6, PTPN12,
PTPRD, PTPRN2, PXDNL, RAB28, RAPGEF2, RAPSN, RHAG, RNF180, RNF19A, ROBO2, SARDH, SCAPER, SH3RF3, SIL1, SLC22A20,
SLC24A3, SLC25A12, SLC37A2, SLCO3A1, SMOC2, SPAG17, SPRED2, SQSTM1, STAG2, STAM, STXBP5L, SUSD1, SYK, SYNE2, TCHH,
TEK, TENM2, TFEC, THOP1, THSD7B, TLN2, TMC1, TNFSF11, TNNI3K, TPST1, TRHDE, TRIM5, TSC22D1, TTC12, UBE2D2, UGGT2,
UTRN, UVRAG, VAV3, VAX1, VCAM1, VPS13B, VWC2, WDPCP, WDE27, WWTR1, XK, XKR4, XYLT1, YTHDC2, ZFPM2, ZNF608, ZPLD1
>24
ABCA10, ABCA12, ABCA13, ABCA4, ABCB1, ABCC6, ABHD3, ACADS, ACADSB, ACOT7, ACSL4, ACSS2, ADAM23, ADAMTS6, ADCY8,
ADH1C, AGBL4, AGK, AGXT, AHI1, AKAP9, ALDH3A2, ALDH5A1, ALG8, ALOX5, ANK3, ANKRD30A, ANKRD50, ANKS1B, ANO3,
ARHGAP24, ARHGEF4, ATRX, BBS5, BBS9, BEND7, BMPR2, BNC2, BRAF, C12orf42, C4orf22, CADM2, CAPN3, CASP8, CASR, CCDC105,
CCDC178, CCDC7, CCSER1, CCT8, CD22, CD28, CD2AP, CDH10, CDH12, CDH13, CDH2, CENPK, CES3, CFH, CNBD1, CNTLN, CNTN5,
CNTNAP2, COL19A1, CPA4, CPNE4, CPNE8, CPXCR1, CRHR1, CRYM, CTNNA3, CTNND2, CTSB, CUBN, CWC27, CYBB, CYP19A1,
CYP1A1, CYP3A5, DAB1, DCC, DDAH1, DDIT4, DHRS2, DISC1, DLD, DLGAP2, DMRTA1, DNAH11, DNAH14, DNAJC13, DNM3, DOCK4,
DYM, DYSF, EGR2, EMB, EN1, EPHA7, EPHX1, EPHX2, ERBB3, ERBB4, ESRRG, EVC, EYS, FAF1, FAM122C, FAM172A, FAM184A,
FANCI, FAT4, FEM1C, FGF14, FOXN3, FOXP2, FRAS1, FSTL4, FUT8, GABRA2, GABRB1, GABRB3, GABRG2, GALNT2, GIF, GLRA2,
GMPR, GOLIM4, GPC5, GPR6, GRID1, GRID2, GRIK2, GRM4, GRM5, GRM8, GTDC1, GYS2, HCN1, HGSNAT, HIVEP1, HMCN1, HMGCR,
HMGN5, HSD17B4, HYOU1, ICOS, IL15, IL1RAPL1, IL1RAPL2, IMMP2L, IQGAP2, ITGA8, ITGAM, ITGAX, ITPR2, JAZF1, KCNE1, KCNH8,
KCNN2, KCTD16, KCTD8, KDM6A, KIF26B, KLHL3, KLHL4, KRT6B, KRTAP9-4, KRTAP9-9, LALBA, LARS2, LBR, LDHC, LDLRAP1,
LHX8, LINGO2, LIPG, LMBR1, LMO1, LRRK2, LUZP2, MASP2, MAST4, MB21D2, MCCC1, MERTK, mir-548, MMP2, MS4A4E, MTG1,
MTUS2, MYRIP, NCOA3, NEK11, NELL1, NFKB1, NKAIN2, NKAIN3, NMT2, NPHP1, NPR3, NRG3, NSUN3, NSUN6, NUDT13, OCA2,
OPHN1, OSBPL1A, OTOL1, OXGR1, PAGE4, PARD3, PDE11A, PDE4D, PDPN, PDS5B, PDZRN4, PEX5, PHACTR1, phosphate, PKHD1,
PLCL1, PLOD2, PLXDC2, PPP2R2B, PPT1, PRKAG2, PRMT6, PROS1, PRPF8, PTPN12, PTPN22, PTPRD, PTPRN2, PXDNL, RAB28,
RAPGEF2, RAPSN, RHAG, RIT2, RNF180, RNF19A, ROBO2, RPL11, SARDH, SCAPER, SCG3, SEMA6D, SGCZ, SH3RF3, SIL1, SLC22A20,
SLC24A3, SLC25A12, SLC37A2, SLC6A3, SLCO3A1, SMOC2, SOD1, SPAG17, SPRED2, SQSTM1, STAG2, STAM, STXBP5L, SUOX, SUSD1,
SYK, SYNE2, TCHH, TDRKH, TEK, TENM2, TFEC, THOP1, THSD7B, TLN2, TMC1, TNFSF11, TNNI3K, TPST1, TRHDE, TRIM36, TRIM5,
TSC22D1, TTC12, TUSC3, UBE2D2, UGGT2, ULK4, UTRN, UVRAG, VAV3, VAX1, VCAM1, VPS13B, VWC2, WDPCP, WDR27, WWTR1, XK,
XKR4, XYLT1, YTHDC2, ZBTB49, ZFPM2, ZNF608, ZPLD1
>25
ABCA10, ABCA12, ABCA13, ABCA4, ABCB1, ABCC6, ABHD3, ACADS, ACADSB, ACOT7, ACSL4, ACSS2, ADAM23, ADAMTS6, ADCY8,
ADH1C, AGBL4, AGK, AGXT, AHI1, AKAP9, ALDH3A2, ALDH5A1, ALG8, ALOX5, ANK3, ANKRD30A, ANKRD50, ANKS1B, ANO3,
ARHGAP24, ARHGEF4, ATRX, BBS5, BBS9, BEND7, BMPR2, BNC2, BOD1, BRAF, C12orf42, C4orf22, CADM2, CAMKMT, CASP8, CASR,
CCDC105, CCDC178, CCDC7, CCSER1, CCT8, CD22, CD28, CD2AP, CDH10, CDH12, CDH13, CDH2, CENPK, CES3, CFH, CHRNA7, CLN3,
CNBD1, CNTLN, CNTN5, CNTNAP2, COL19A1, CPA4, CPNE4, CPNE8, CPXCR1, CRHR1, CRYM, CTNNA3, CTNND2, CTSB, CUBN,
CWC27, CXCL13, CYBB, CYP19A1, CYP1A1, CYP3A5, DAB1, DCC, DDAH1, DDIT4, DHRS2, DISC1, DLD, DLGAP2, DMRTA1, DNAH11,
DNAH14, DNAJC13, DNM3, DOCK4, DYM, DYSF, EGR2, EMB, EN1, EPHA7, EPHX1, EPHX2, ERBB3, ERBB4, ESRRG, EVC, EYS, FAF1,
FAM122C, FAM172A, FAM184A, FANCI, FAT4, FEM1C, FGF14, FOXN3, FOXP2, FRAS1, FSTL4, FUT8, GABRA2, GABRB1, GABRB3,
GABRG2, GALNT2, GIF, GLRA2, GMPR, GOLIM4, GPC5, GPR6, GRID1, GRID2, GRIK2, GRM4, GRM5, GRM8, GTDC1, GYS2, HCN1,
HGSNAT, HIVEP1, HMCN1, HMGCR, HMGN5, HPGD, HSD17B4, HYOU1, ICOS, IL1RAPL1, IL1RAPL2, IMMP2L, IQGAP2, ITGA8, ITGAM,
ITGAX, ITPR2, JAZF1, KCNE1, KCNH8, KCNN2, KCTD16, KCTD8, KDM6A, KIF26B, KLHL3, KLHL4, KRT6B, KRTAP9-2, KRTAP9-4,
KRTAP9-8, KRTAP9-9, LALBA, LARS2, LBR, LDHC, LDLRAP1, LHX8, LINGO2, LIPG, LMBR1, LMO1, LRRK2, LUZP2, MASP2, MAST4,
MB21D2, MCCC1, MERTK, MMP2, MS4A4E, MTG1, MTUS2, MYRIP, NCOA3, NEK11, NELL1, NFKB1, NKAIN2, NKAIN3, NMT2, NPHP1,
NPR3, NRG3, NSUN3, NSUN6, NUDT13, OCA2, OPHN1, OSBPL1A, OTOL1, OXGR1, PAGE4, PARD3, PDE11A, PDE4D, PDPN, PDS5B,
PDZRN4, PEX5, PHACTR1, phosphate, PKHD1, PLCL1, PLOD2, PLXDC2, PPARGC1A, PPP2R2B, PPT1, PRKAG2, PRMT6, PROS1, PRPF8,
PTPN12, PTPN22, PTPRD, PTPRN2, PXDNL, RAB28, RAPGEF2, RAPSN, RHAG, RIT2, RNF180, RNF19A, ROBO2, RPL11, SARDH,
SCAPER, SCG3, SEMA6D, SGCZ, SH3RF3, SIL1, SLC22A20, SLC24A3, SLC25A12, SLC37A2, SLC6A3, SLCO3A1, SMOC2, SOD1, SPAG17,
SPRED2, SQSTM1, STAG2, STAM, STXBP5L, SUOX, SUSD1, SYK, SYNE2, TCHH, TDRKH, TEK, TENM2, TFEC, THOP1, THSD7B, TLN2,
TMC1, TNFSF11, TNNI3K, TPST1, TRHDE, TRIM36, TRIM5, TSC22D1, TTC12, TUSC3, UBE2D2, UGGT2, ULK4, UTRN, UVRAG, VAV3,
VAX1, VCAM1, VPS13B, VWC2, WDPCP, WDR27, WWTR1, XK, XKR4, XYLT1, YTIIDC2, ZBTB49, ZFPM2, ZNF608, ZPLD1
>26
ABCA10, ABCA12, ABCA13, ABCA4, ABCB1, ABCC6, ABHD3, ACADS, ACADSB, ACOT7, ACSL4, ACSS2, ADAM23, ADAMTS6, ADCY8,
AGBL4, AGXT, AHI1, AKAP9, ALDH3A2, ALG8, ALOX5, ANK3, ANKRD30A, ANKRD50, ANKS1B, ARHGAP24, ARHGEF4, ATRX, BBS9,
BMPR2, BNC2, BRAF, C12orf42, C4orf22, CAPN3, CASP8, CASR, CCDC105, CCDC178, CCDC7, CCSER1, CCT8, CD22, CD28, CD2AP,
CDH10, CDH12, CDH13, CDH2, CENPK, CES3, CFH, CNBD1, CNTLN, CNTN5, CNTNAP2, COL19A1, CPA4, CPNE4, CPNE8, CTNNA3,
CTNND2, CTSB, CUBN, CWC27, CYBB, CYP19A1, CYP3A5, DAB1, DCC, DDIT4, DISC1, DLD, DLGAP2, DMRTA1, DNAH11, DNAH14,
DNAJC13, DNM3, DOCK4, DYM, DYSF, EGR2, EN1, EPHA7, EPHX1, EPHX2, ERBB3, ERBB4, EVC, EYS, FAM122C, FAM172A, FANCI,
FAT4, FEM1C, FGF14, FOXN3, FOXP2, FRAS1, FSTL4, FUT8, GABRA2, GABRB3, GALNT2, GPC5, GPR6, GRID1, GRID2, GRIK2, GRM4,
GRM5, GRM8, GTDC1, GYS2, HCN1, HGSNAT, HIVEP1, HMCN1, HMGCR, HMGN5, HSD17B4, HYOU1, IL15, IL1RAPL2, IQGAP2, ITGA8,
ITGAM, ITGAX, ITPR2, JAZF1, KCNE1, KCNH8, KCTD16, KCTD8, KDM6A, KIF26B, KRT6B, KRTAP9-9, LALBA, LARS2, LDHC, LDLRAP1,
LHX8, LINGO2, LIPG, LRRK2, MASP2, MAST4, MB21D2, MCCC1, MERTK, mir-548, MMP2, MTG1, MTUS2, MYRIP, NCOA3, NELL1,
NMT2, NPIIP1, NPR3, NRG3, NSUN3, NSUN6, OCA2, OSBPL1A, OTOL1, PARD3, PDE11A, PDE4D, PDS5B, PDZRN4, PEX5, PIIACTR1,
phosphate, PKHD1, PLCL1, PLOD2, PLXDC2, PPP2R2B, PPT1, PRKAG2, PRMT6, PTPN12, PTPRD, PTPRN2, PXDNL, RAB28, RAPGEF2,
RAPSN, RHAG, RNF180, RNF19A, ROBO2, SARDH, SCAPER, SH3RF3, SIL1, SLC22A20, SLC24A3, SLC25A12, SLC37A2, SLCO3A1, SMOC2,
SPAG17, SPRED2, SQSTM1, STAG2, STAM, STXBP5L, SUSD1, SYK, SYNE2, TCHH, TEK, TENM2, TFEC, THOP1, THSD7B, TLN2,
TMC1, TNFSF11, TNNI3K, TPST1, TRIIDE, TRIM5, TSC22D1, TTC12, UBE2D2, UGGT2, ULK4, UTRN, UVRAG, VAV3, VAX1, VCAM1,
VPS13B, VWC2, WDPCP, WDR27, WWTR1, XK, XKR4, XYLT1, YTHDC2, ZFPM2, ZNF608, ZPLD1
>27
ABCA10, ABCA12, ABCA13, ABCA4, ABCB1, ABCC6, ABHD3, ACADS, ACADSB, ACOT7, ACSL4, ACSS2, ADAM23, ADAMTS6, ADCY8,
AGBL4, AGXT, AHI1, AKAP9, ALDH3A2, ALG8, ALOX5, ANK3, ANKRD30A, ANKRD50, ANKS1B, ARHGAP24, ARHGEF4, ATRX, BBS9,
BMPR2, BNC2, BRAF, C12orf42, C4orf22, CAPN3, CASP8, CASR, CCDC105, CCDC178, CCDC7, CCSER1, CCT8, CD22, CD28, CD2AP,
CDH10, CDH12, CDH13, CDH2, CENPK, CES3, CFH, CNBD1, CNTLN, CNTN5, CNTNAP2, COL19A1, CPA4, CPNE4, CPNE8, CTNNA3,
CTNND2, CTSB, CUBN, CWC27, CYBB, CYP19A1, CYP3A5, DAB1, DCC, DDIT4, DISC1, DLD, DLGAP2, DMRTA1, DNAH11, DNAH14,
DNAJC13, DNM3, DOCK4, DYM, DYSF, EGR2, EN1, EPHA7, EPHX1, EPHX2, ERBB3, ERBB4, EVC, EYS, FAM122C, FAM172A, FANCI,
FAT4, FEM1C, FGF14, FOXN3, FOXP2, FRAS1, FSTL4, FUT8, GABRA2, GABRB3, GALNT2, GPC5, GPR6, GRID1, GRID2, GRIK2, GRM4,
GRM5, GRM8, GTDC1, GYS2, HCN1, HGSNAT, HIVEP1, HMCN1, HMGCR, HMGN5, HSD17B4, HYOU1, IL15, IL1RAPL2, IQGAP2, ITGA8,
ITGAM, ITGAX, ITPR2, JAZF1, KCNE1, KCNH8, KCTD16, KCTD8, KDM6A, KIF26B, KRT6B, KRTAP9-9, LALBA, LARS2, LDHC, LDLRAP1,
LHX8, LINGO2, LIPG, LRRK2, MASP2, MAST4, MB21D2, MCCC1, MERTK, mir-548, MMP2, MTG1, MTUS2, MYRIP, NCOA3, NELL1,
NMT2, NPHP1, NPR3, NRG3, NSUN3, NSUN6, OCA2, OSBPL1A, OTOL1, PARD3, PDE11A, PDE4D, PDS5B, PDZRN4, PEX5, PHACTR1,
phosphate, PKHD1, PLCL1, PLOD2, PLXDC2, PPP2R2B, PPT1, PRKAG2, PRMT6, PTPN12, PTPRD, PTPRN2, PXDNL, RAB28, RAPGEF2,
RAPSN, RHAG, RNF180, RNF19A, ROBO2, SARDH, SCAPER, SH3RF3, SIL1, SLC22A20, SLC24A3, SLC25A12, SLC37A2, SLCO3A1, SMOC2,
SPAG17, SPRED2, SQSTM1, STAG2, STAM, STXBP5L, SUSD1, SYK, SYNE2, TCHH, TEK, TENM2, TFEC, THOP1, THSD7B, TLN2,
TMC1, TNFSF11, TNNI3K, TPST1, TRHDE, TRIM5, TSC22D1, TTC12, UBE2D2, UGGT2, UTRN, UVRAG, VAV3, VAX1, VCAM1, VPS13B,
VWC2, WDPCP, WDR27, WWTR1, XK, XKR4, XYLT1, YTHDC2, ZFPM2, ZNF608, ZPLD1
>28
ABCA10, ABCA12, ABCA13, ABCA4, ABCB1, ABCC6, ABHD3, ACADS, ACADSB, ACOT7, ACSL4, ACSS2, ADAM23, ADAMTS6, ADCY8,
ADH1C, AGBL4, AGK, AGXT, AHI1, AKAP9, ALDH3A2, ALDH5A1, ALG8, ALOX5, ANK3, ANKRD30A, ANKRD50, ANKS1B, ANO3,
ARHGAP24, ARHGEF4, ATRX, BBS5, BBS9, BEND7, BMPR2, BNC2, BOD1, BRAF, C12orf42, C4orf22, CADM2, CAMKMT, CASP8, CASR,
CCDC105, CCDC178, CCDC7, CCSER1, CCT8, CD22, CD28, CD2AP, CDH10, CDH12, CDH13, CDH2, CENPK, CES3, CFH, CHRNA7, CLN3,
CNBD1, CNTLN, CNTN5, CNTNAP2, COL19A1, CPA4, CPNE4, CPNE8, CPXCR1, CRHR1, CRYM, CTNNA3, CTNND2, CTSB, CUBN,
CWC27, CXCL13, CYBB, CYP19A1, CYP1A1, CYP3A5, DAB1, DCC, DDAH1, DDIT4, DHRS2, DISC1, DLD, DLGAP2, DMRTA1, DNAH11,
DNAH14, DNAJC13, DNM3, DOCK4, DYM, DYSF, EGR2, EMB, EN1, EPHA7, EPHX1, EPHX2, ERBB3, ERBB4, ESRRG, EVC, EYS, FAF1,
FAM122C, FAM172A, FAM184A, FANCI, FAT4, FEM1C, FGF14, FOXN3, FOXP2, FRAS1, FSTL4, FUT8, GABRA2, GABRB1, GABRB3,
GABRG2, GALNT2, GIF, GMPR, GOLIM4, GPC5, GPR6, GRID1, GRID2, GRIK2, GRM4, GRM5, GRM8, GTDC1, GYS2, HCN1, HGSNAT,
HIVEP1, HMCN1, HMGCR, HMGN5, HPGD, HSD17B4, HYOU1, ICOS, IL1RAPL1, IL1RAPL2, IMMP2L, IQGAP2, ITGA8, ITGAM, ITGAX,
ITPR2, JAZF1, KCNE1, KCNH8, KCNN2, KCTD16, KCTD8, KDM6A, KIF26B, KLHL3, KLHL4, KRT6B, KRTAP9-2, KRTAP9-4, KRTAP9-8,
KRTAP9-9, LALBA, LARS2, LBR, LDHC, LDLRAP1, LHX8, LINGO2, LIPG, LMBR1, LMO1, LRRK2, LUZP2, MASP2, MAST4, MB21D2,
MCCC1, MERTK, MMP2, MS4A4E, MTG1, MTUS2, MYRIP, NCOA3, NEK11, NELL1, NFKB1, NKAIN2, NKAIN3, NMT2, NPHP1, NPR3,
NRG3, NSUN3, NSUN6, NUDT13, OCA2, OPHN1, OSBPL1A, OTOL1, OXGR1, PAGE4, PARD3, PDE11A, PDE4D, PDPN, PDS5B, PDZRN4,
PEX5, PHACTR1, PKHD1, PLCL1, PLOD2, PLXDC2, PPARGC1A, PPP2R2B, PPT1, PRKAG2, PRMT6, PROS1, PRPF8, PTPN12, PTPN22,
PTPRD, PTPRN2, PXDNL, RAB28, RAPGEF2, RAPSN, RHAG, RIT2, RNF180, RNF19A, ROBO2, RPL11, SARDH, SCAPER, SCG3, SEMA6D,
SGCZ, SH3RF3, SIL1, SLC22A20, SLC24A3, SLC25A12, SLC37A2, SLC6A3, SLCO3A1, SMOC2, SOD1, SPAG17, SPRED2, SQSTM1, STAG2,
STAM, STXBP5L, SUOX, SUSD1, SYK, SYNE2, TCHH, TDRKH, TEK, TENM2, TFEC, THOP1, THSD7B, TLN2, TMC1, TNFSF11, TNNI3K,
TPST1, TRHDE, TRIM36, TRIM5, TSC22D1, TTC12, TUSC3, UBE2D2, UGGT2, ULK4, UTRN, UVBAG, VAV3, VAX1, VCAM1, VPS13B,
VWC2, WDPCP, WDR27, WWTR1, XK, XKR4, XYLT1, YTHDC2, ZBTB49, ZFPM2, ZNF608, ZPLD1
>29
ABCA10, ABCA12, ABCA13, ABCA4, ABCB1, ABCC6, ACADS, ACADSB, ACSL4, ACSS2, ADAM23, AGBL4, AGK, AKAP9, ALOX5, ANK3,
ANKRD30A, ANKRD50, ANKS1B, ANO3, ATRX, BBS5, BBS9, BNC2, BRAF, C12orf42, C4orf22, CASP8, CASR, CCDC7, CDH10, CDH12,
CDH2, CFH, CNTN5, CNTNAP2, COL19A1, CTNNA3, CTNND2, CUBN, CYBB, CYP1A1, CYP3A5, DCC, DISC1, DLGAP2, DNAH11,
DNAH14, DNAJC13, DNM3, DOCK4, DYM, DYSF, EGR2, EPHA7, EPHX1, ERBB3, ERBB4, EVC, EYS, FAT4, FOXP2, FUT8, GABRA2,
GABRB1, GABRG2, GIF, GMPR, GRID1, GRM4, GRM5, GRM8, GTDC1, HCN1, HMCN1, HMGN5, IL1RAPL1, IMMP2L, ITGAM, ITGAX,
ITPR2, KCNH8, KDM6A, KRT6B, LHX8, LINGO2, LRRK2, MAST4, MTG1, MTUS2, NCOA3, NEK11, NRG3, OPHN1, OSBPL1A, OXGR1,
PAGE4, PARD3, PDE4D, PDS5B, PDZRN4, PKHD1, PLCL1, PPP2R2B, PRKAG2, PROS1, PRPF8, PTPN22, PTPRD, PTPRN2, PXDNL,
RAPGEF2, ROBO2, SCAPER, SEMA6D, SLC24A3, SLC25A12, SLCO3A1, SPRED2, STAG2, STXBP5L, SUSD1, SYNE2, TCHH, TEK, TENM2,
THOP1, THSD7B, TLN2, TNNI3K, TRHDE, TRIM36, TSC22D1, TUSC3, UGGT2, ULK4, UTRN, UVRAG, VPS13B, WDPCP, WWTR1, XKR4,
YTHDC2, ZFPM2
>30
ABCA10, ABCA12, ABCA13, ABCA4, ABCB1, ABCC6, ABHD3, ACADS, ACADSB, ACOT7, ACSL4, ACSS2, ADAM23, ADAMTS6, ADCY8,
ADH1C, AGBL4, AGK, AGXT, AHI1, AKAP9, ALDH3A2, ALDH5A1, ALG8, ALOX5, ANK3, ANKRD30A, ANKRD50, ANKS1B, ANO3,
ARHGAP24, ARHGEF4, ATRX, BBS5, BBS9, BEND7, BMPR2, BNC2, BOD1, BRAF, C12orf42, C4orf22, CADM2, CAMKMT, CASP8, CASR,
CCDC105, CCDC178, CCDC7, CCSER1, CCT8, CD22, CD28, CD2AP, CDH10, CDH12, CDH13, CDH2, CENPK, CES3, CFH, CHRNA7, CLN3,
CNBD1, CNTLN, CNTN5, CNTNAP2, COL19A1, CPA4, CPNE4, CPNE8, CPXCR1, CRHR1, CRYM, CTNNA3, CTNND2, CTSB, CUBN,
CWC27, CXCL13, CYBB, CYP19A1, CYP1A1, CYP3A5, DAB1, DCC, DDAH1, DDIT4, DHRS2, DISC1, DLD, DLGAP2, DMRTA1, DNAH11,
DNAH14, DNAJC13, DNM3, DOCK4, DYM, DYSF, EGR2, EMB, EN1, EPHA7, EPHX1, EPHX2, ERBB3, ERBB4, ESRRG, EVC, EYS, FAF1,
FAM122C, FAM172A, FAM184A, FANCI, FAT4, FEM1C, FGF14, FOXN3, FOXP2, FRAS1, FSTL4, FUT8, GABRA2, GABRB1, GABRB3,
GABRG2, GALNT2, GIF, GLRA2, GMPR, GOLIM4, GPC5, GPR6, GRID1, GRID2, GRIK2, GRM4, GRM5, GRM8, GTDC1, GYS2, HCN1,
HGSNAT, HIVEP1, HMCN1, HMGCR, HMGN5, HPGD, HSD17B4, HYOU1, ICOS, IL15, IL1RAPL1, IL1RAPL2, IMMP2L, IQGAP2, ITGA8,
ITGAM, ITGAX, ITPR2, JAZF1, KCNE1, KCNH8, KCNN2, KCTD16, KCTD8, KDM6A, KIF26B, KLHL3, KLHL4, KRT6B, KRTAP9-2,
KRTAP9-4, KRTAP9-8, KRTAP9-9, LALBA, LARS2, LBR, LDHC, LDLRAP1, LHX8, LINGO2, LIPG, LMBR1, LMO1, LRRK2, LUZP2, MASP2,
MAST4, MB21D2, MCCC1, MERTK, MMP2, MS4A4E, MTG1, MTUS2, MYRIP, NCOA3, NEK11, NELL1, NFKB1, NKAIN2, NKAIN3, NMT2,
NPHP1, NPR3, NRG3, NSUN3, NSUN6, NUDT13, OCAS, OPHN1, OSBPL1A, OTOL1, OXGR1, PAGE4, PARD3, PDE11A, PDE4D, PDPN,
PDS5B, PDZRN4, PEX5, PHACTR1, phosphate, PKHD1, PLCL1, PLOD2, PLXDC2, PPARGC1A, PPP2R2B, PPT1, PRKAG2, PRMT6, PROS1,
PRPF8, PTPN12, PTPN22, PTPRD, PTPRN2, PXDNL, RAB28, RAPGEF2, RAPSN, RHAG, RIT2, RNF180, RNF19A, ROBO2, RPL11, SARDH,
SCAPER, SCG3, SEMA6D, SGCZ, SH3RF3, SIL1, SLC22A20, SLC24A3, SLC25A12, SLC37A2, SLC6A3, SLCO3A1, SMOC2, SOD1, SPAG17,
SPRED2, SQSTM1, STAG2, STAM, STXBP5L, SUOX, SUSD1, SYK, SYNE2, TCHH, TDRKH, TEK, TENM2, TFEC, THOP1, THSD7B, TLN2,
TMC1, TNFSF11, TNNI3K, TPST1, TRHDE, TRIM36, TRIM5, TSC22D1, TTC12, TUSC3, UBE2D2, UGGT2, ULK4, UTRN, UVRAG, VAV3,
VAX1, VCAM1, VPS13B, VWC2, WDPCP, WDR27, WWTR1, XK, XKR4, XYLT1, YTHDC2, ZBTB49, ZFPM2, ZNF608, ZPLD1
>31
ABCA10, ABCA12, ABCA13, ABCA4, ABCB1, ABCC6, ACADSB, ACSL4, ACSS2, ADAM23, AGBL4, AGK, AKAP9, ALOX5, ANK3,
ANKRD30A, ANKRD50, ANKS1B, ANO3, ATRX, BBS5, BBS9, BNC2, BRAF, C12orf42, C4orf22, CASP8, CASR, CCDC7, CDH10, CDH12,
CDH13, CDH2, CNTN5, CNTNAP2, COL19A1, CTNNA3, CTNND2, CTSB, CUBN, CYBB, CYP19A1, CYP1A1, CYP3A5, DCC, DISC1,
DLGAP2, DNAH11, DNAH14, DNAJC13, DOCK4, DYM, DYSF, EPHA7, ERBB3, ERBB4, EYS, FAT4, FOXP2, FLIT8, GABRA2, GABRB1,
GABRG2, GIF, GMPR, GRM4, GRM5, GRM8, GTDC1, HCN1, HMCN1, HMGN5, IL1RAPL1, IMMP2L, ITGAM, ITGAX, ITPR2, KCNH8,
KDM6A, KRT6B, LHX8, LINGO2, LRRK2, MAST4, MB21D2, MMP2, MTG1, MTUS2, NEK11, NRG3, OPHN1, OXGR1, PAGE4, PARD3,
PDE4D, PDS5B, PDZRN4, PKIID1, PLCL1, PPP2R2B, PRKAG2, PROS1, PRPF8, PTPN22, PTPRD, PTPRN2, PXDNL, RAPGEF2, ROBO2,
SCAPER, SEMA6D, SLC24A3, SLC25A12, SLCO3A1, SPRED2, STAG2, STXBP5L, SUSDl, SYNE2, TCHH, TEK, THOP1, THSD7B, TLN2,
TNNI3K, TRHDE, TSC22D1, TUSC3, UGGT2, ULK4, UTRN, UVRAG, VPS13B, WWTR1, XKR4, XYLT1, YTHDC2, ZFPM2
>32
ABCA10, ABCA12, ABCA13, ABCA4, ABCB1, ABCC6, ACADS, ACADSB, ACOT7, ACSL4, ACSS2, ADAM23, ADCY8, AGBL4, AGK, AGXT,
AHI1, AKAP9, ALDH5A1, ALG8, ALOX5, ANK3, ANKRD30A, ANKRD50, ANKS1B, ANO3, ATRX, BBS5, BBS9, BEND7, BMPR2, BNC2,
BRAF, C12orf42, C4orf22, CADM2, CASP8, CASR, CCDC178, CCDC7, CCSER1, CCT8, CD22, CD2AP, CDH10, CDH12, CDH13, CDH2, CES3,
CFH, CNBD1, CNTLN, CNTN5, CNTNAP2, COL19A1, CPA4, CPNE4, CPNE8, CRHR1, CTNNA3, CTNND2, CUBN, CWC27, CYBB,
CYP1A1, CYP3A5, DAB1, DCC, DISC1, DLGAP2, DNAHII11, DNAII14, DNAJC13, DNM3, DOCK4, DYM, DYSF, EGR2, EN1, EPIIA7, EPIIX1,
EPHX2, ERBB3, ERBB4, EVC, EYS, FAM122C, FAT4, FEM1C, FGF14, FOXN3, FOXP2, FRAS1, FSTL4, FUT8, GABRA2, GABRB1,
GABRB3, GABRG2, GIF, GMPR, GPC5, GRID1, GRID2, GRIK2, GRM4, GRM5, GRM8, GTDC1, HCN1, HIVEP1, HMCN1, HMGCR, HMGN5,
HSD17B4, IL1RAPL1, IL1RAPL2, IMMP2L, IQGAP2, ITGAM, ITGAX, ITPR2, JAZF1, KCNH8, KCTD16, KCTD8, KDM6A, KIF26B, KRT6B,
KRTAP9-4, LARS2, LDIIC, LDLRAP1, LIIX8, LINGO2, LRRK2, MAST4, MB21D2, MCCC1, MMP2, MTG1, MTUS2, NCOA3, NEK11, NPIIP1,
NPR3, NRG3, NSUN6, OCA2, OPHN1, OSBPL1A, OTOL1, OXGR1, PAGE4, PARD3, PDE4D, PDS5B, PDZRN4, PHACTR1, PKHD1, PLCL1,
PLOD2, PPP2R2B, PRKAG2, PROS1, PRPF8, PTPN22, PTPRD, PTPRN2, PXDNL, RAPGEF2, RAPSN, RNF19A, ROBO2, SARDH, SCAPER,
SCG3, SEMA6D, SGCZ, SH3RF3, SLC24A3, SLC25A12, SLC6A3, SLCO3A1, SPAG17, SPRED2, SQSTM1, STAG2, STXBP5L, SUSD1, SYNE2,
TCIIII, TDRKII, TEK, TENM2, TFEC, TIIOP1, TIISD7B, TLN2, TMC1, TNNI3K, TRIIDE, TRIM36, TSC22D1, TUSC3, UGGT2, ULK4,
UTRN, UVRAG, VAV3, VAX1, VCAM1, VPS13B, WDPCP, WWTR1, XK, XKR4, YTHDC2, ZFPM2, ZNF608, ZPLD1
>33
ABCA10, ABCA12, ABCA13, ABCA4, ABCB1, ABCC6, ACADS, ACADSB, ACSL4, ACSS2, ADAM23, AGBL4, AGK, AKAP9, ALOX5, ANK3,
ANKRD30A, ANKRD50, ANKS1B, ANO3, ATRX, BBS5, BBS9, BNC2, BRAF, C12orf42, C4orf22, CASP8, CASR, CCDC7, CDH10, CDH12,
CDH2, CFH, CNTN5, CNTNAP2, COL19A1, CTNNA3, CTNND2, CUBN, CYBB, CYP1A1, CYP3A5, DCC, DISC1, DLGAP2, DNAH11,
DNAH14, DNAJC13, DNM3, DOCK4, DYM, DYSF, EGR2, EPHA7, EPHX1, ERBB3, ERBB4, EVC, EYS, FAT4, FOXP2, FUT8, GABRA2,
GABRB1, GABRG2, GIF, GMPR, GR1D1, GRM4, GRM5, GRM8, GTDC1, HCN1, HIVEP1, HMCN1, HMGN5, IL1RAPL1, IMMP2L, ITGAM,
ITGAX, ITPR2, KCNH8, KDM6A, KRT6B, LHX8, LINGO2, LRRK2, MAST4, MCCC1, MTG1, MTUS2, NCOA3, NEK11, NRG3, OPHN1,
OSBPL1A, OXGR1, PAGE4, PARD3, PDE4D, PDS5B, PDZRN4, PKHD1, PLCL1, PPP2R2B, PRKAG2, PROS1, PRPF8, PTPN22, PTPRD,
PTPRN2, PXDNL, RAPGEF2, ROBO2, SCAPER, SEMA6D, SLC24A3, SLC25A12, SLCO3A1, SPRED2, STAG2, STXBP5L, SUSD1, SYNE2,
TCHH, TEK, TENM2, THOP1, THSD7B, TLN2, TNN13K, TRHDE, TRIM36, TSC22D1, TUSC3, UGGT2, ULK4, UTRN, UVRAG, VAV3,
VPS13B, WDPCP, WWTR1, XKR4, YTHDC2, ZFPM2, ZPLD1
>34
ABCA10, ABCA12, ABCA13, ABCA4, ABCB1, ABCC6, ABHD3, ACADS, ACADSB, ACOT7, ACSL4, ACSS2, ADAM23, ADAMTS6, ADCY8,
ADH1C, AGBL4, AGK, AGXT, AH11, AKAP9, ALDH3A2, ALDH5A1, ALG8, ALOX5, ANK3, ANKRD30A, ANKRD50, ANKS1B, ANO3,
ARHGAP24, ARHGEF4, ATRX, BBS5, BBS9, BEND7, BMPR2, BNC2, BRAF, C12orf42, C4orf22, CADM2, CASP8, CASR, CCDC105,
CCDC178, CCDC7, CCSER1, CCT8, CD22, CD28, CD2AP, CDH10, CDH12, CDH13, CDH2, CENPK, CES3, CFH, CNBD1, CNTLN, CNTN5,
CNTNAP2, COL19A1, CPA4, CPNE4, CPNE8, CPXCR1, CRHR1, CRYM, CTNNA3, CTNND2, CTSB, CUBN, CWC27, CYBB, CYP19A1,
CYP1A1, CYP3A5, DAB1, DCC, DDIT4, DISC1, DLD, DLGAP2, DMRTA1, DNAH11, DNAH14, DNAJC13, DNM3, DOCK4, DYM, DYSF,
EGR2, EMB, EN1, EPHA7, EPHX1, EPHX2, ERBB3, ERBB4, ESRRG, EVC, EYS, FAF1, FAM122C, FAM172A, FAM184A, FANCI, FAT4,
FEM1C, FGF14, FOXN3, FOXP2, FRAS1, FSTL4, FUT8, GABRA2, GABRB1, GABRB3, GABRG2, GALNT2, GIF, GMPR, GPC5, GPR6,
GRID1, GRID2, GRIK2, GRM4, GRM5, GRM8, GTDC1, GYS2, HCN1, HGSNAT, HIVEP1, HMCN1, HMGCR, HMGN5, HSD17B4, HYOU1,
IL1RAPL1, IL1RAPL2, IMMP2L, IQGAP2, ITGA8, ITGAM, ITGAX, ITPR2, JAZF1, KCNE1, KCNH8, KCTD16, KCTD8, KDM6A, KIF26B,
KLHL4, KRT6B, KRTAP9-4, KRTAP9-9, LALBA, LARS2, LDHC, LDLRAP1, LHX8, LINGO2, LIPG, LRRK2, MASP2, MAST4, MB21D2,
MCCC1, MERTK, MMP2, MTG1, MTUS2, MYRIP, NCOA3, NEK11, NELL1, NMT2, NPHP1, NPR3, NRG3, NSUN3, NSUN6, OCA2, OPHN1,
OSBPL1A, OTOL1, OXGR1, PAGE4, PARD3, PDE11A, PDE4D, PDS5B, PDZRN4, PHACTR1, PKHD1, PLCL1, PLOD2, PLXDC2, PPP2R2B,
PPT1, PRKAG2, PRMT6, PROS1, PRPF8, PTPN12, PTPN22, PTPRD, PTPRN2, PXDNL, RAB28, RAPGEF2, RAPSN, RHAG, RNF180,
RNF19A, ROBO2, RPL11, SARDH, SCAPER, SCG3, SEMA6D, SGCZ, SH3RF3, SIL1, SLC22A20, SLC24A3, SLC25A12, SLC37A2, SLC6A3,
SLCO3A1, SMOC2, SPAG17, SPRED2, SQSTM1, STAG2, STAM, STXBP5L, SUSD1, SYK, SYNE2, TCHH, TDRKH, TEK, TENM2, TFEC,
THOP1, THSD7B, TLN2, TMC1, TNFSF11, TNNI3K, TPST1, TRHDE, TRIM36, TRIM5, TSC22D1, TTC12, TUSC3, UBE2D2, UGGT2, ULK4,
UTRN, UVRAG, VAV3, VAX1, VCAM1, VPS13B, VWC2, WDPCP, WDR27, WWTR1, XK, XKR4, XYLT1, YTHDC2, ZBTB49, ZFPM2, ZNF608,
ZPLD1
>35
ABCA10, ABCA12, ABCA13, ABCA4, ABCB1, ABCC6, ACADSB, ACSL4, ACSS2, ADAM23, AGBL4, AGK, AKAP9, ALOX5, ANK3,
ANKRD30A, ANKRD50, ANKS1B, ANO3, ATRX, BBS5, BBS9, BNC2, BRAF, C12orf42, C4orf22, CASP8, CASR, CCDC7, CDH10, CDH12,
CDH13, CDH2, CFH, CNTN5, CNTNAP2, COL19A1, CTNNA3, CTNND2, CTSB, CUBN, CYBB, CYP19A1, CYP1A1, CYP3A5, DCC, DISC1,
DLGAP2, DNAH11, DNAH14, DNAJC13, DOCK4, DYM, DYSF, EPHA7, ERBB3, ERBB4, ESRRG, EYS, FAT4, FOXP2, FUT8, GABRA2,
GABRB1, GABRG2, GIF, GMPR, GRM4, GRM5, GRM8, GTDC1, HCN1, HMCN1, HMGN5, HYAL1, IL1RAPL1, IMMP2L, ITGAM, ITGAX,
ITPR2, KCNH8, KDM6A, KRT6B, LDHC, LHX8, LINGO2, LRRK2, MAST4, MB21D2, MMP2, MTG1, MTUS2, NEK11, NRG3, OPHN1,
OXGR1, PAGE4, PARD3, PDE4D, PDS5B, PDZRN4, PKHD1, PLCL1, PPP2R2B, PRKAG2, PROS1, PRPF8, PTPN22, PTPRD, PTPRN2,
PXDNL, RAPGEF2, ROBO2, SCAPER, SEMA6D, SLC24A3, SLC25A12, SLCO3A1, SPRED2, STAG2, STXBP5L, SUSD1, SYNE2, TCHH, TEK,
THOP1, THSD7B, TLN2, TNNI3K, TRHDE, TSC22D1, TUSC3, UGGT2, ULK4, UTRN, UVRAG, VPS13B, WWTR1, XKR4, XYLT1, YTHDC2,
ZFPM2
>36
ABCA10, ABCA12, ABCA13, ABCA4, ABCB1, ABCC6, ACADS, ACADSB, ACOT7, ACSL4, ACSS2, ADAM23, ADCY8, AGBL4, AGK, AGXT,
AHI1, AKAP9, ALDH5A1, ALG8, ALOX5, ANK3, ANKRD30A, ANKRD50, ANKS1B, ANO3, ATRX, BBS5, BBS9, BEND7, BMPR2, BNC2,
BRAF, C12orf42, C4orf22, CADM2, CASP8, CASR, CCDC178, CCDC7, CCSER1, CCT8, CD22, CD2AP, CDH10, CDH12, CDH13, CDH2, CES3,
CFH, CNBD1, CNTLN, CNTN5, CNTNAP2, COL19A1, CPA4, CPNE4, CPNE8, CRHR1, CTNNA3, CTNND2, CTSB, CUBN, CWC27, CYBB,
CYP19A1, CYP1A1, CYP3A5, DAB1, DCC, DISC1, DLGAP2, DNAH11, DNAH14, DNAJC13, DNM3, DOCK4, DYM, DYSF, EGR2, EN1,
EPHA7, EPHX1, EPHX2, ERBB3, ERBB4, EVC, EYS, FAM122C, FAT4, FEM1C, FGF14, FOXN3, FOXP2, MAS1, FSTL4, FUT8, GABRA2,
GABRB1, GABRB3, GABRG2, GIF, GMPR, GPC5, GRID1, GRID2, GRIK2, GRM4, GRM5, GRM8, GTDC1, HCN1, HIVEP1, HMCN1, HMGCR,
HMGN5, HSD17B4, IL1RAPL1, IL1RAPL2, IMMP2L, IQGAP2, ITGAM, ITGAX, ITPR2, JAZF1, KCNH8, KCTD16, KCTD8, KDM6A, KIF26B,
KRT6B, KRTAP9-4, LARS2, LDHC, LDLRAP1, LHX8, LINGO2, LRRK2, MAST4, MB21D2, MCCC1, MMP2, MTG1, MTUS2, NCOA3, NEK11,
NPHP1, NPR3, NRG3, NSUN6, OCA2, OPHN1, OSBPL1A, OTOL1, OXGR1, PAGE4, PARD3, PDE4D, PDS5B, PDZRN4, PHACTR1, PKHD1,
PLCL1, PLOD2, PPP2R2B, PRKAG2, PROS1, PRPF8, PTPN22, PTPRD, PTPRN2, PXDNL, RAPGEF2, RAPSN, RNF19A, ROBO2, SARDH,
SCAPER, SCG3, SEMA6D, SGCZ, SH3RF3, SLC24A3, SLC25A12, SLC6A3, SLCO3A1, SPAG17, SPRED2, SQSTM1, STAG2, STXBP5L,
SUSD1, SYNE2, TCHH, TDRKH, TEK, TENM2, TFEC, THOP1, THSD7B, TLN2, TMC1, TNNI3K, TRHDE, TRIM36, TSC22D1, TUSC3,
UGGT2, ULK4, UTRN, UVRAG, VAV3, VAX1, VCAM1, VPS13B, WDPCP, WWTR1, XK, XKR4, YTHDC2, ZFPM2, ZNF608, ZPLD1
>37
ABCA10, ABCA12, ABCA13, ABCA4, ABCB1, ABCC6, ACADS, ACADSB, ACSL4, ACSS2, ADAM23, AGBL4, AGK, AKAP9, ALOX5, ANK3,
ANKRD30A, ANKRD50, ANKS1B, ANO3, ATRX, BBS5, BBS9, BMPR2, BNC2, BRAF, C12orf42, C4orf22, CASP8, CASR, CCDC105, CCDC7,
CDH10, CDH12, CDH13, CDH2, CFH, CNTN5, CNTNAP2, COL19A1, CPNE8, CTNNA3, CTNND2, CTSB, CUBN, CYBB, CYP19A1, CYP1A1,
CYP3A5, DCC, DDIT4, DISC1, DLGAP2, DNAH11, DNAH14, DNAJC13, DNM3, DOCK4, DYM, DYSF, EGR2, EPHA7, EPHX1, ERBB3,
ERBB4, ESRRG, EVC, EYS, FAM122C, FAM184A, FAT4, FOXP2, FRAS1, FUT8, GABRA2, GABRB1, GABRB3, GABRG2, GIF, GMPR,
GRID1, GRM4, GRM5, GRM8, GTDC1, HCN1, HIVEP1, HMCN1, HMGN5, HSD17B4, ICOS, IL1RAPL1, IMMP2L, ITGAM, ITGAX, ITPR2,
KCNH8, KCTD8, KDM6A, KLHL3, KRT6B, LDHC, LHX8, LINGO2, LRRK2, MAST4, MB21D2, MCCC1, MMP2, MTG1, MTUS2, NCOA3,
NEK11, NFKB1, NRG3, OCA2, OPHN1, OSBPL1A, OXGR1, PAGE4, PARD3, PDE11A, PDE4D, PDPN, PDS5B, PDZRN4, PKHD1, PLCL1,
PPP2R2B, PRKAG2, PROS1, PRPF8, PTPN12, PTPN22, PTPRD, PTPRN2, PXDNL, RAPGEF2, ROBO2, RPL11, SCAPER, SEMA6D, SH3RF3,
SLC24A3, SLC25A12, SLCO3A1, SPRED2, STAG2, STXBP5L, SUSD1, SYNE2, TCHH, TEK, TENM2, THOP1, THSD7B, TLN2, TNFSF11,
TNNI3K, TRHDE, TRIM36, TSC22D1, TUSC3, UGGT2, ULK4, UTRN, UVRAG, VAV3, VCAM1, VPS13B, WDPCP, WWTR1, XKR4, XYLT1,
YTHDC2, ZFPM2, ZPLD1
>38
ABCA10, ABCA12, ABCA13, ABCA4, ABCB1, ABCC6, ACADS, ACADSB, ACOT7, ACSL4, ACSS2, ADAM23, AGBL4, AGK, AGXT, AKAP9,
ALDH5A1, ALOX5, ANK3, ANKRD30A, ANKRD50, ANKS1B, ANO3, ATRX, BBS5, BBS9, BNC2, BRAF, C12orf42, C4orf22, CADM2, CASP8,
CASR, CCDC105, CCDC7, CDH10, CDH12, CDH13, CDH2, CFH, CNTN5, CNTNAP2, COL19A1, CPNE8, CTNNA3, CTNND2, CTSB, CUBN,
CWC27, CYBB, CYP19A1, CYP1A1, CYP3A5, DCC, DDIT4, DISC1, DLGAP2, DNAH11, DNAH14, DNAJC13, DNM3, DOCK4, DYM, DYSF,
EGR2, EPHA7, EPHX1, ERBB3, ERBB4, ESRRG, EVC, EYS, FAM122C, FAM184A, FAT4, FOXP2, FRAS1, FUT8, GABRA2, GABRB1,
GABRB3, GABRG2, GIF, GMPR, GRID1, GRM4, GRM5, GRM8, GTDC1, IICN1, IIIVEP1, IIMCN1, IIMGCR, IIMGN5, IISD17B4, ICOS,
IL1RAPL1, IMMP2L, ITGAM, ITGAX, ITPR2, KCNH8, KCTD8, KDM6A, KRT6B, KRTAP9-4, LHX8, LINGO2, LRRK2, MAST4, MB21D2,
MCCC1, MMP2, MTG1, MTUS2, NCOA3, NEK11, NMT2, NRG3, OCA2, OPHN1, OSBPL1A, OXGR1, PAGE4, PARD3, PDE4D, PDPN,
PDS5B, PDZRN4, PKHD1, PLCL1, PLOD2, PPP2R2B, PRKAG2, PROS1, PRPF8, PTPN12, PTPN22, PTPRD, PTPRN2, PXDNL, RAPGEF2,
ROBO2, RPL11, SCAPER, SCG3, SEMAGD, SII3RF3, SLC24A3, SLC25A12, SLCO3A1, SPRED2, STAG2, STXBP5L, SUSD1, SYNE2, TCIIII,
TEK, TENM2, THOP1, THSD7B, TLN2, TNFSF11, TNNI3K, TRHDE, TRIM36, TSC22D1, TUSC3, UGGT2, ULK4, UTRN, UVRAG, VAV3,
VCAM1, VPS13B, WDPCP, WWTR1, XK, XKR4, YTHDC2, ZFPM2, ZPLD1
>39
ABCA10, ABCA12, ABCA13, ABCA4, ABCB1, ABCC6, ACADS, ACADSB, ACSL4, ACSS2, ADAM23, AGBL4, AGK, AKAP9, ALOX5, ANK3,
ANKRD30A, ANKRD50, ANKS1B, ANO3, ATRX, BBS5, BBS9, BNC2, BRAF, C12orf42, C4orf22, CASP8, CASR, CCDC7, CDH10, CDH12,
CDH13, CDH2, CFH, CNTN5, CNTNAP2, COL19A1, CTNNA3, CTNND2, CTSB, CUBN, CYBB, CYP19A1, CYP1A1, CYP3A5, DCC, DISC1,
DLGAP2, DNAH11, DNAH14, DNAJC13, DNM3, DOCK4, DYM, DYSF, EGR2, EPHA7, EPHX1, ERBB3, ERBB4, EVC, EYS, FAM122C, FAT4,
FOXP2, FUT8, GABRA2, GABRB1, GABRG2, GIF, GMPR, GRID1, GRM4, GRM5, GRM8, GTDC1, IICN1, IIIVEP1, IIMCN1, IIMGN5, ICOS,
IL1RAPL1, IMMP2L, ITGAM, ITGAX, ITPR2, KCNH8, KDM6A, KRT6B, LDHC, LHX8, LINGO2, LRRK2, MAST4, MB21D2, MCCC1, MMP2,
MTG1, MTUS2, NCOA3, NEK11, NRG3, OCA2, OPHN1, OSBPL1A, OXGR1, PAGE4, PARD3, PDE4D, PDS5B, PDZRN4, PKHD1, PLCL1,
PPP2R2B, PRKAG2, PROS1, PRPF8, PTPN22, PTPRD, PTPRN2, PXDNL, RAPGEF2, ROBO2, SCAPER, SEMA6D, SLC24A3, SLC25A12,
SLCO3A1, SPRED2, STAG2, STXBP5L, SUSD1, SYNE2, TCIIII, TEK, TENM2, TIIOP1, TIISD7B, TLN2, TNNI3K, TRIIDE, TRIM36,
TSC22D1, TUSC3, UGGT2, ULK4, UTRN, UVRAG, VAV3, VCAM1, VPS13B, WDPCP, WWTR1, XKR4, XYLT1, YTHDC2, ZFPM2, ZPLD1
>40
ABCA10, ABCA12, ABCA13, ABCA4, ABCB1, ABCC6, ACADS, ACADSB, ACSL4, ACSS2, ADAM23, AGBL4, AGK, AKAP9, ALOX5, ANK3,
ANKRD30A, ANKRD50, ANKS1B, ANO3, ATRX, BBS5, BBS9, BMPR2, BNC2, BRAF, C12orf42, C4orf22, CASP8, CASR, CCDC105, CCDC7,
CDH10, CDH12, CDH13, CDH2, CFH, CNTN5, CNTNAP2, COL19A1, CPNE8, CTNNA3, CTNND2, CTSB, CUBN, CYBB, CYP19A1, CYP1A1,
CYP3A5, DCC, DDIT4, DISC1, DLGAP2, DNAH11, DNAH14, DNAJC13, DNM3, DOCK4, DYM, DYSF, EGR2, EPHA7, EPHX1, ERBB3,
ERBB4, ESRRG, EVC, EYS, FAM122C, FAM184A, FAT4, FOXP2, FRAS1, FUT8, GABRA2, GABRB1, GABRB3, GABRG2, GIF, GMPR,
GRID1, GRM4, GRM5, GRM8, GTDC1, HCN1, HIVEP1, HMCN1, HMGN5, HSD17B4, HYAL1, ICOS, IL1RAPL1, IMMP2L, ITGAM, ITGAX,
ITPR2, KCNH8, KCTD8, KDM6A, KLHL3, KRT6B, LDHC, LHX8, LINGO2, LRRK2, MAST4, MB21D2, MCCC1, MMP2, MTG1, MTUS2,
NCOA3, NEK11, NFKB1, NRG3, OCA2, OPHN1, OSBPL1A, OXGR1, PAGE4, PARD3, PDE11A, PDE4D, PDPN, PDS5B, PDZRN4, PKHD1,
PLCL1, PPP2R2B, PRKAG2, PROS1, PRPF8, PTPN12, PTPN22, PTPRD, PTPRN2, PXDNL, RAPGEF2, ROBO2, RPL11, SCAPER, SEMA6D,
SH3RF3, SLC24A3, SLC25A12, SLCO3A1, SPRED2, STAG2, STXBP5L, SUSD1, SYNE2, TCHH, TEK, TENM2, THOP1, THSD7B, TLN2,
TNFSF11, TNNI3K, TRHDE, TRIM36, TSC22D1, TUSC3, UGGT2, ULK4, UTRN, UVRAG, VAV3, VCAM1, VPS13B, WDPCP, WWTR1, XKR4,
XYLT1, YTHDC2, ZFPM2, ZPLD1
>41
ABCA10, ABCA12, ABCA13, ABCA4, ABCB1, ABCC6, ACADS, ACADSB, ACSL4, ACSS2, ADAM23, AGBL4, AGK, AKAP9, ALOX5, ANK3,
ANKRD30A, ANKRD50, ANKS1B, ANO3, ATRX, BBS5, BBS9, BMPR2, BNC2, BRAF, C12orf42, C4orf22, CASP8, CASR, CCDC105, CCDC7,
CDH10, CDH12, CDH13, CDH2, CFH, CNTN5, CNTNAP2, COL19A1, CPNE8, CTNNA3, CTNND2, CTSB, CUBN, CYBB, CYP19A1, CYP1A1,
CYP3A5, DCC, DDIT4, DISC1, DLGAP2, DNAH11, DNAH14, DNAJC13, DNM3, DOCK4, DYM, DYSF, EGR2, EPHA7, EPHXI, ERBB3,
ERBB4, ESRRG, EVC, EYS, FAM122C, FAM184A, FAT4, FOXP2, FRAS1, FUT8, GABRA2, GABRB1, GABRB3, GABRG2, GIF, GMPR,
GRID1, GRM4, GRM5, GRM8, GTDC1, HCN1, HIVEP1, HMCN1, HMGN5, HSD17B4, HYAL1, IL1RAPL1, IMMP2L, ITGAM, ITGAX, ITPR2,
KCNH8, KCTD8, KDM6A, KLHL3, KRT6B, LDHC, LHX8, LINGO2, LRRK2, MAST4, MB21D2, MCCC1, MMP2, MTG1, MTUS2, NCOA3,
NEK11, NEKB1, NRG3, OCA2, OPHN1, OSBPL1A, OXGR1, PAGE4, PARD3, PDE11A, PDE4D, PDPN, PDS5B, PDZRN4, PKHD1, PLCL1,
PPP2R2B, PRKAG2, PROS1, PRPF8, PTPN12, PTPN22, PTPRD, PTPRN2, PXDNL, RAPGEF2, ROBO2, RPL11, SCAPER, SEMA6D, SH3RF3,
SLC24A3, SLC25A12, SLCO3A1, SPRED2, STAG2, STXBP5L, SUSD1, SYNE2, TCHH, TEK, TENM2, THOP1, THSD7B, TLN2, TNFSF11,
TNNI3K, TRHDE, TRIM36, TSC22D1, TUSC3, UGGT2, ULK4, UTRN, UVRAG, VAV3, VCAM1, VPS13B, WDPCP, WWTR1, XKR4, XYLT1,
YTHDC2, ZFPM2, ZPLD1
>42
ABCA10, ABCA12, ABCA13, ABCA4, ABCB1, ABCC6, ACADS, ACADSB, ACSL4, ACSS2, ADAM23, AGBL4, AGK, AKAP9, ALOX5, ANK3,
ANKRD30A, ANKRD50, ANKS1B, ANO3, ATRX, BBS5, BBS9, BMPR2, BNC2, BRAF, C12orf42, C4orf22, CASP8, CASR, CCDC105, CCDC7,
CDH10, CDH12, CDH13, CDH2, CFH, CNTN5, CNTNAP2, COL19A1, CPNE8, CTNNA3, CTNND2, CTSB, CUBN, CWC27, CYBB, CYP19A1,
CYP1A1, CYP3A5, DCC, DDIT4, DISC1, DLGAP2, DNAH11, DNAH14, DNAJC13, DNM3, DOCK4, DYM, DYSF, EGR2, EPHA7, EPHX1,
ERBB3, ERBB4, ESRRG, EVC, EYS, FAM122C, FAM184A, FAT4, FOXP2, FRAS1, FSTL4, FUT8, GABRA2, GABRB1, GABRB3, GABRG2,
GIF, GMPR, GRID1, GRIK2, GRM4, GRM5, GRM8, GTDC1, HCN1, HIVEP1, HMCN1, HMGN5, HSD17B4, ICOS, IL1RAPL1, IL1RAPL2,
IMMP2L, ITGAM, ITGAX, ITPR2, KCNH8, KCTD8, KDM6A, KLHL3, KRT6B, LDHC, LHX8, LINGO2, LRRK2, MAST4, MB21D2, MCCC1,
MMP2, MTG1, MTUS2, NCOA3, NEK11, NEKB1, NMT2, NRG3, OCA2, OPHN1, OSBPL1A, OXGR1, PAGE4, PARD3, PDE11A, PDE4D,
PDS5B, PDZRN4, PKHD1, PLCL1, PPP2R2B, PRKAG2, PROS1, PRPF8, PTPN12, PTPN22, PTPRD, PTPRN2, PXDNL, RAPGEF2, ROBO2,
RPL11, SCAPER, SEMA6D, SH3RF3, SLC24A3, SLC25A12, SLCO3A1, SPRED2, STAG2, STXBP5L, SUSD1, SYNE2, TCHH, TEK, TENM2,
THOP1, THSD7B, TLN2, TNFSF11, TNNI3K, TRHDE, TRIM36, TSC22D1, TUSC3, UGGT2, ULK4, UTRN, UVRAG, VAV3, VCAM1, VPS13B,
WDPCP, WWTR1, XKR4, XYLT1, YTHDC2, ZFPM2, ZPLD1
>43
ABCA10, ABCA12, ABCA13, ABCA4, ABCB1, ABCC6, ACADS, ACADSB, ACSL4, ACSS2, ADAM23, AGBL4, AGK, AKAP9, ALOX5, ANK3,
ANKRD30A, ANKRD50, ANKS1B, ANO3, ATRX, BBS5, BBS9, BNC2, BRAF, C12orf42, C4orf22, CASP8, CASR, CCDC7, CDH10, CDH12,
CDH13, CDH2, CFH, CNTN5, CNTNAP2, COL19A1, CTNNA3, CTNND2, CTSB, CUBN, CYBB, CYP19A1, CYP1A1, CYP3A5, DCC, DISC1,
DLGAP2, DNAH11, DNAH14, DNAJC13, DNM3, DOCK4, DYM, DYSF, EGR2, EPHA7, EPHX1, ERBB3, ERBB4, ESRRG, EVC, EYS,
FAM122C, FAT4, FOXP2, FUT8, GABRA2, GABRB1, GABRG2, GIF, GMPR, GRID1, GRM4, GRM5, GRM8, GTDC1, HCN1, HIVEP1,
HMCN1, HMGN5, HYAL1, ICOS, IL1RAPL1, IMMP2L, ITGAM, ITGAX, ITPR2, KCNH8, KDM6A, KRT6B, LDHC, LHX8, LINGO2, LRRK2,
MAST4, MB21D2, MCCC1, MMP2, MTG1, MTUS2, NCOA3, NEK11, NRG3, OCA2, OPHN1, OSBPL1A, OXGR1, PAGE4, PARD3, PDE4D,
PDS5B, PDZRN4, PKHD1, PLCL1, PPP2R2B, PRKAG2, PROS1, PRPF8, PTPN22, PTPRD, PTPRN2, PXDNL, RAPGEF2, ROBO2, SCAPER,
SEMA6D, SLC24A3, SLC25A12, SLCO3A1, SPRED2, STAG2, STXBP5L, SUSD1, SYNE2, TCHH, TEK, TENM2, THOP1, THSD7B, TLN2,
TNNI3K, TRHDE, TRIM36, TSC22D1, TUSC3, UGGT2, ULK4, UTRN, UVRAG, VAV3, VCAM1, VPS13B, WDPCP, WWTR1, XKR4, XYLT1,
YTHDC2, ZFPM2, ZPLD1
>44
ABCA10, ABCA12, ABCA13, ABCA4, ABCB1, ABCC6, ACADS, ACADSB, ACSL4, ACSS2, ADAM23, AGBL4, AGK, AKAP9, ALOX5, ANK3,
ANKRD30A, ANKRD50, ANKS1B, ANO3, ATRX, BBS5, BBS9, BNC2, BRAF, C12orf42, C4orf22, CASP8, CASR, CCDC7, CDH10, CDH12,
CDH13, CDH2, CFH, CNTN5, CNTNAP2, COL19A1, CTNNA3, CTNND2, CTSB, CUBN, CYBB, CYP19A1, CYP1A1, CYP3A5, DCC, DISC1,
DLGAP2, DNAH11, DNAH14, DNAJC13, DNM3, DOCK4, DYM, DYSF, EGR2, EPHA7, EPHX1, ERBB3, ERBB4, ESRRG, EVC, EYS,
FAM122C, FAT4, FOXP2, FUT8, GABRA2, GABRB1, GABRG2, GIF, GMPR, GRID1, GRM4, GRM5, GRM8, GTDC1, HCN1, HIVEP1,
HMCN1, HMGN5, HYAL1, IL1RAPL1, IMMP2L, ITGAM, ITGAX, ITPR2, KCNH8, KDM6A, KRT6B, LDHC, LHX8, LINGO2, LRRK2, MAST4,
MB21D2, MCCC1, MMP2, MTG1, MTUS2, NCOA3, NEK11, NRG3, OCA2, OPHN1, OSBPL1A, OXGR1, PAGE4, PARD3, PDE4D, PDS5B,
PDZRN4, PKHD1, PLCL1, PPP2R2B, PRKAG2, PROS1, PRPF8, PTPN22, PTPRD, PTPRN2, PXDNL, RAPGEF2, ROBO2, SCAPER, SEMA6D,
SLC24A3, SLC25A12, SLCO3A1, SPRED2, STAG2, STXBP5L, SUSD1, SYNE2, TCHH, TEK, TENM2, THOP1, THSD7B, TLN2, TNNI3K,
TRHDE, TRIM36, TSC22D1, TUSC3, UGGT2, ULK4, UTRN, UVRAG, VAV3, VCAM1, VPS13B, WDPCP, WWTR1, XKR4, XYLT1, YTHDC2,
ZFPM2, ZPLD1
>45
ABCA12, ACADS, ADAM23, ADCY8, AKAP9, ALOX5, ANKRD30A, ANKS1B, ANO3, ATRX, BBS9, BMPR2, BRAF, CADM2, CASP8, CASR,
CCDC105, CCDC7, CDH10, CDH12, CDH2, CFH, CNTLN, CNTN5, CNTNAP2, COL19A1, CPNE8, CRHR1, CRYM, CUBN, CYP19A1,
CYP3A5, DCC, DDIT4, DISC1, DLD, DNAH11, DNAH14, DNAJC13, DNM3, DOCK4, DYSF, EMB, EPHA7, ERBB3, ERBB4, ESRRG, EVC,
EYS, FAF1, FAM184A, FANCI, FAT4, FOXP2, FRAS1, FUT8, GABRA2, GABRB1, GABRB3, GALNT2, GLRA2, GRID2, GRIK2, GRM4, GRM5,
GYS2, HCN1, HIVEP1, HMCN1, HSD17B4, HYOU1, IL1RAPL1, ITGAX, ITPR2, KCTD8, KIF26B, KLHL3, KRTAP9-4, LRRK2, MAST4,
MCCC1, MMP2, MTUS2, NCOA3, NFKB1, NPHP1, NSUN6, OCA2, OPHN1, OTOL1, PDE11A, PDE4D, PDS5B, PHACTR1, PKHD1, PLCL1,
PLOD2, PLXDC2, PPARGC1A, PTPN12, PTPRD, PTPRN2, PXDNL, RAPGEF2, RHAG, ROBO2, RPL11, SCAPER, SH3RF3, SLC22A20,
SLC37A2, SMOC2, STAG2, SYK, SYNE2, TCHH, TEK, TENM2, TFEC, THSD7B, TLN2, TNFSF11, TNNI3K, TRHDE, TRIM36, ULK4,
UTRN, VAV3, VCAM1, XK, ZBTB49, ZFPM2
>46
ABCA10, ABCA12, ABCA13, ABCA4, ABCB1, ABCC6, ACADS, ACADSB, ACOT7, ACSL4, ACSS2, ADAM23, AGBL4, AGK, AGXT, AKAP9,
ALDH5A1, ALOX5, ANK3, ANKRD30A, ANKRD50, ANKS1B, ANO3, ATRX, BBS5, BBS9, BMPR2, BNC2, BRAF, C12orf42, C4orf22, CADM2,
CASP8, CASR, CCDC105, CCDC7, CDH10, CDH12, CDH13, CDH2, CFH, CNTN5, CNTNAP2, COL19A1, CPNE8, CTNNA3, CTNND2, CTSB,
CUBN, CWC27, CYBB, CYP19A1, CYP1A1, CYP3A5, DCC, DDIT4, DISC1, DLGAP2, DNAII11, DNAII14, DNAJC13, DNM3, DOCK4, DYM,
DYSF, EGR2, EPHA7, EPHX1, ERBB3, ERBB4, ESRRG, EVC, EYS, FAM122C, FAM184A, FAT4, FOXP2, FRAS1, FUT8, GABRA2, GABRB1,
GABRB3, GABRG2, GIF, GMPR, GRID1, GRM4, GRM5, GRM8, GTDC1, HCN1, HIVEP1, HMCN1, HMGCR, HMGN5, HSD17B4, ICOS,
IL1RAPL1, IMMP2L, ITGAM, ITGAX, ITPR2, KCNH8, KCTD8, KDM6A, KLHL3, KRT6B, KRTAP9-4, LDHC, LHX8, LINGO2, LRRK2,
MAST4, MB21D2, MCCC1, MMP2, MTG1, MTUS2, NCOA3, NEK11, NFKB1, NMT2, NRG3, OCA2, OPIIN1, OSBPL1A, OXGR1, PAGE4,
PARD3, PDE11A, PDE4D, PDPN, PDS5B, PDZRN4, PKHD1, PLCL1, PLOD2, PPP2R2B, PRKAG2, PROS1, PRPF8, PTPN12, PTPN22,
PTPRD, PTPRN2, PXDNL, RAPGEF2, ROBO2, RPL11, SCAPER, SCG3, SEMA6D, SH3RF3, SLC24A3, SLC25A12, SLCO3A1, SPRED2,
STAG2, STXBP5L, SUSD1, SYNE2, TCHH, TEK, TENM2, THOP1, THSD7B, TLN2, TNFSF11, TNNI3K, TRHDE, TRIM36, TSC22D1, TUSC3,
UGGT2, ULK4, UTRN, UVRAG, VAV3, VCAM1, VPS13B, WDPCP, WWTR1, XK, XKR4, XYLT1, YTIIDC2, ZFPM2, ZPLD1
>47
ABCA10, ABCA12, ABCA13, ABCB1, ACOT7, ACSL4, ADAM23, ADCY8, AGBL4, AGXT, AHI1, AKAP9, ALG8, ANK3, ANKRD30A,
ANKRD50, ANO3, ATRX, BEND7, BMPR2, BNC2, BRAF, C4orf22, CASP8, CASR, CCDC178, CCDC7, CCSER1, CCT8, CD22, CD2AP,
CDII10, CDII12, CDII13, CDII2, CES3, CFII, CNBD1, CNTLN, CNTN5, CNTNAP2, CPA4, CPNE4, CPNE8, CRIIR1, CTNNA3, CTNND2,
CUBN, CWC27, CXCL13, DAB1, DCC, DLGAP2, DNAH11, DNAH14, DNAJC13, DNM3, DOCK4, DYM, DYSF, EGR2, EN1, EPHA7, EPHX1,
EPHX2, ERBB3, ERBB4, EVC, EYS, FAT4, FEM1C, FGF14, FOXN3, FOXP2, FRAS1, FSTL4, GABRB3, GPC5, GRID2, GRIK2, GRM5,
GRM8, HCN1, HMCN1, HMGN5, IL1RAPL2, IQGAP2, ITGA8, ITGAX, JAZF1, KCNH8, KCTD16, KCTD8, KIF26B, KRT6B, LARS2, LDHC,
LDLRAP1, LINGO2, LRRK2, MAST4, MB21D2, MMP2, MTG1, MTUS2, MYRIP, NCOA3, NPIIP1, NPR3, NRG3, NSUN6, OCA2, OPIIN1,
OSBPL1A, OTOL1, PDPN, PDS5B, PDZRN4, PEX5, PHACTR1, PKHD1, PLOD2, PPP2R2B, PTPRN2, PXDNL, RAPGEF2, RAPSN, RNF19A,
ROBO2, SARDH, SCAPER, SEMA6D, SGCZ, SH3RF3, SLC24A3, SLC6A3, SLCO3A1, SPAG17, SPRED2, SQSTM1, STAG2, STXBP5L, SYNE2,
TCHH, TDRKH, TEK, TENM2, TFEC, THSD7B, TMC1, TNN13K, TRHDE, TSC22D1, TUSC3, UGGT2, ULK4, UTRN, VAX1, VCAM1,
VPS13B, WDPCP, WWTR1, YTHDC2, ZNF608
>48
ABCA10, ABCA12, ABCA13, ABCB1, ACSL4, ADAM23, ADCY8, AGBL4, AGXT, AHI1, AKAP9, ALG8, ANK3, ANKRD30A, ANKRD50,
ANO3, ATRX, BEND7, BMPK2, BNC2, BRAF, C4orf22, CASP8, CASR, CCDC178, CCDC7, CCSER1, CCT8, CD22, CD2AP, CDH10,
CDH12, CDH13, CDH2, CES3, CFH, CNBD1, CNTLN, CNTN5, CNTNAP2, CPA4, CPNE4, CPNE8, CRHR1, CTNNA3, CTNND2, CUBN,
CWC27, DAB1, DLGAP2, DNAH11, DNAH14, DNAJC13, DNM3, DOCK4, DYM, DYSF, EGR2, EN1, EPHA7, EPHX1, EPHX2, ERBB3,
ERBB4, EVC, EYS, FAT4, FEM1C, FGF14, FOXN3, FOXP2, FRAS1, FSTL4, GABRB3, GPC5, GRID2, GRIK2, GRM5, GRM8, HCN1,
HMCN1, HMGN5, IL1RAPL2, 1QGAP2, ITGAX, JAZF1, KCNH8, KCTD16, KCTD8, KIF26B, KKT6B, LARS2, LDHC, LDLRAP1, L1NGO2,
LRRK2, MAST4, MB21D2, MTG1, MTUS2, MYRIP, NCOA3, NPHP1, NPR3, NRG3, NSUN6, OCA2, OPHN1, OSBPL1A, OTOL1, PDS5B,
PDZRN4, PHACTR1, PKHD1, PLOD2, PPP2R2B, PTPRN2, PXDNL, RAPGEF2, RAPSN, RNF19A, ROBO2, SARDH, SCAPER, SEMA6D,
SGCZ, SH3RF3, SLC24A3, SLC6A3, SLCO3A1, SPAG17, SPRED2, SQSTM1, STXBP5L, SYNE2, TCHH, TDRKH, TEK, TENM2, TFEC,
THSD7B, TMC1, TNNI3K, TRHDE, TSC22D1, TUSC3, UGGT2, ULK4, UTRN, VAX1, VCAM1, VPS13B, WDPCP, WWTR1, YTHDC2,
ZNF608
>49
ABCA10, ABCA13, ABCB1, ADCY8, AGBL4, ANK3, ANO3, BEND7, BNC2, BRAF, CASR, CCDC178, CCT8, CDH10, CDH12, CDH2, CFH,
CNBD1, CNTLN, CNTN5, CNTNAP2, CPNE4, CRHR1, CTNND2, CUBN, DAB1, DLGAP2, DNAJC13, DOCK4, DYSF, EGR2, EPHA7, ERBB3,
EKBB4, EVC, EYS, FAT4, FSTL4, GABRB3, GRID2, GKM5, HMCN1, KCNH8, KCTD16, LINGO2, LRRK2, MAST4, MTUS2, MYRIP,
NCOA3, NPHP1, NPR3, OPHN1, PDS5B, PKHD1, PXDNL, SARDH, SEMA6D, SGCZ, SLC24A3, SLC6A3, SPRED2, STXBP5L, SYNE2, TCHH,
TDRKH, TENM2, THSD7B, TNNI3K, TRHDE, TUSC3, ULK4, UTRN, VAX1
>50
ABCA10, ABCA12, ABCA13, ABCB1, ADCY8, AGBL4, AGXT, AKAP9, ANK3, ANO3, BEND7, BMPR2, BNC2, BRAF, CASP8, CASR,
CCDC178, CCDC7, CCT8, CDH10, CDH12, CDH13, CDH2, CFH, CNBD1, CNTLN, CNTN5, CNTNAP2, CPNE4, CRHR1, CTNND2, CUBN,
CXCL13, DAB1, DCC, DLGAP2, DNAJC13, DOCK4, DYSF, EGR2, EPHA7, ERBB3, ERBB4, EVC, EYS, FAT4, FSTL4, GABRB3, GRID2,
GRIK2, GRM5, HMCN1, HMGCR, ITGA8, KCNH8, KCTD16, LINGO2, LRRK2, MAST4, MMP2, MTUS2, MYRIP, NCOA3, NFKB1, NPHP1,
NPR3, OPHN1, PDPN, PDS5B, PKHD1, PLOD2, PXDNL, ROBO2, SARDH, SEMA6D, SGCZ, SLC24A3, SLC6A3, SPRED2, STXBP5L, SYNE2,
TCHH, TDRKH, TENM2, THSD7B, TNNI3K, TRHDE, TUSC3, ULK4, UTRN, UVRAG, VAV3, VAX1
>51
ABCA13, ABCA4, ALDH5A1, ANK3, ANKRD30A, ANKS1B, BBS9, CADM2, CCSER1, CDH2, CLN3, CNTN5, CNTNAP2, COL19A1, CPNE4,
CTNND2, CUBN, DCC, DLGAP2, DNAH14, DOCK4, ERBB4, EYS, FAT4, FUT8, GABRB3, GRM8, GTDC1, GYS2, HCN1, ITGA8, JAZF1,
KIF26B, MAST4, NELL1, OCA2, PDZRN4, PKHD1, PPARGC1A, PROS1, PXDNL, ROBO2, SCG3, SGCZ, SOD1, STXBP5L, SYK, THOP1,
THSD7B, TLN2, TRHDE, VCAM1, WDR27, XKR4
>52
ABCA10, ABCA12, ABCA13, ABCB1, ADCY8, AGBL4, AGXT, AKAP9, ANK3, ANO3, BEND7, BMPR2, BNC2, BRAF, CASP8, CASR,
CCDC178, CCDC7, CCT8, CDH10, CDH12, CDH2, CFH, CNBD1, CNTLN, CNTN5, CNTNAP2, CPNE4, CRHR1, CTNND2, CUBN, DAB1,
DCC, DLGAP2, DNAJC13, DOCK4, DYSF, EGR2, EPHA7, ERBB3, ERBB4, EVC, EYS, FAT4, FSTL4, GABRB3, GRID2, GRIK2, GRM5,
HMCN1, HMGCR, KCNH8, KCTD16, LINGO2, LRRK2, MAST4, MTUS2, MYRIP, NCOA3, NFKB1, NPHP1, NPR3, OPHN1, PDPN, PDS5B,
PKHD1, PXDNL, SARDH, SEMA6D, SGCZ, SLC24A3, SLC6A3, SPRED2, STXBP5L, SYNE2, TCHH, TDRKH, TENM2, THSD7B, TNNI3K,
TRHDE, TUSC3, ULK4, UTRN, UVRAG, VAV3, VAX1
>53
ABCA12, ADAM23, ADCY8, AKAP9, ANKRD30A, ANKS1B, ANO3, ATRX, BBS9, BRAF, CADM2, CASR, CCDC7, CDH10, CDH12, CDH2,
CNTLN, CNTN5, CNTNAP2, COL19A1, CRHR1, CRYM, CUBN, DISC1, DLD, DNAH11, DNAH14, DNAJC13, DNM3, DOCK4, DYSF, EMB,
EPHA7, ERBB3, ERBB4, ESRRG, EVC, EYS, FAF1, FANCI, FAT4, FRAS1, GABRA2, GABRB1, GABRB3, GALNT2, GRID2, GRIK2, GRM4,
GRM5, GYS2, HCN1, HIVEP1, HMCN1, HYOU1, IL1RAPL1, ITPR2, KIF26B, KRTAP9-4, LRRK2, MAST4, MCCC1, MMP2, MTUS2, NCOA3,
NPHP1, NSUN6, OCA2, OPHN1, OTOL1, PDE4D, PDS5B, PHACTR1, PKHD1, PLCL1, PLOD2, PLXDC2, PTPRD, PXDNL, RAPGEF2, RHAG,
ROBO2, SCAPER, SH3RF3, SLC22A20, SLC37A2, SMOC2, STAG2, SYK, SYNE2, TENM2, TFEC, THSD7B, TLN2, TNNI3K, TRIM36,
UTRN, WWTR1, ZBTB49, ZFPM2
>54
ABCA10, ABCA13, ABCB1, ADCY8, AGBL4, ANK3, ANO3, BEND7, BNC2, BRAF, CASP8, CASR, CCDC178, CCT8, CDH10, CDH12, CDH2,
CFH, CNBD1, CNTLN, CNTN5, CNTNAP2, CPNE4, CRHR1, CTNND2, CUBN, DAB1, DCC, DLGAP2, DNAJC13, DOCK4, DYSF, EGR2,
EPHA7, ERBB3, ERBB4, EVC, EYS, FAT4, FSTL4, GABRB3, GRID2, GRM5, HMCN1, KCNH8, KCTD16, LINGO2, LRRK2, MAST4, MTUS2,
MYRIP, NCOA3, NPHP1, NPR3, OPHN1, PDS5B, PKHD1, PXDNL, SARDH, SEMA6D, SGCZ, SLC24A3, SLC6A3, SPRED2, STXBP5L,
SYNE2, TCHH, TDRKH, TENM2, THSD7B, TNNI3K, TRHDE, TUSC3, ULK4, UTRN, VAX1
>55
ABCA12, ADAM23, ADCY8, AKAP9, ANKRD30A, ANKS1B, ANO3, ATRX, BBS9, BRAF, CADM2, CASR, CCDC7, CDH10, CDH12, CNTLN,
CNTN5, CNTNAP2, COL19A1, CRHR1, CRYM, CUBN, DISC1, DLD, DNAH11, DNAH14, DNAJC13, DNM3, DOCK4, DYSF, EMB, EPHA7,
ERBB3, ERBB4, ESRRG, EVC, EYS, FAF1, FANCI, FAT4, FRAS1, GABRA2, GABRB1, GABRB3, GALNT2, GRID2, GRIK2, GRM4, GRM5,
GYS2, HCN1, HIVEP1, HMCN1, HYOU1, IL1RAPL1, ITPR2, KIF26B, KRTAP9-4, LRRK2, MAST4, MCCC1, MTUS2, NPHP1, NSUN6, OCA2,
OPHN1, OTOL1, PDE4D, PDS5B, PHACTR1, PKHD1, PLCL1, PLOD2, PLXDC2, PTPRD, PXDNL, RAPGEF2, RHAG, ROBO2, SCAPER,
SH3RF3, SLC22A20, SLC37A2, SMOC2, STAG2, SYK, SYNE2, TENM2, TFEC, THSD7B, TLN2, TNNI3K, TRIM36, UTRN, ZBTB49, ZFPM2
>56
ABCA12, ADAM23, ADCY8, AKAP9, ANKRD30A, ANKS1B, ANO3, ATRX, BBS9, BRAF, CADM2, CASR, CCDC178, CCDC7, CDH10, CDH12,
CDH2, CNTLN, CNTN5, CNTNAP2, COL19A1, CRHR1, CRYM, CTSB, CUBN, DISC1, DLD, DNAH11, DNAH14, DNAJC13, DNM3, DOCK4,
DYM, DYSF, EMB, EPHA7, ERBB3, ERBB4, ESRRG, EVC, EYS, FAF1, FANCI, FAT4, FRAS1, GABRA2, GABRB1, GABRB3, GALNT2,
GLRA2, GRID2, GRIK2, GRM4, GRM5, GYS2, HCN1, HIVEP1, HMCN1, HYOU1, IL1RAPL1, ITPR2, KDM6A, KIF26B, KRTAP9-4, KRTAP9-
8, LRRK2, MAST4, MCCC1, MTUS2, NPHP1, NSUN6, OCA2, OPHN1, OTOL1, PDE4D, PDS5B, PHACTR1, PKHD1, PLCL1, PLOD2,
PLXDC2, PTPRD, PXDNL, RAPGEF2, RHAG, ROBO2, SCAPER, SH3RF3, SLC22A20, SLC37A2, SMOC2, SPAG17, STAG2, SYK, SYNE2,
TENM2, TFEC, THSD7B, TLN2, TNNI3K, TRIM36, ULK4, UTRN, VAV3, ZBTB49, ZFPM2
>57
ABCA13, ABCA4, ALDH5A1, ANK3, ANKRD30A, ANKS1B, BBS9, BRAF, CADM2, CCSER1, CDH2, CLN3, CNTN5, CNTNAP2, COL19A1,
CPNE4, CTNND2, CUBN, DCC, DLGAP2, DNAH14, DOCK4, ERBB4, EYS, FAT4, FUT8, GABRB3, GRM8, GTDC1, GYS2, HCN1, ITGA8,
JAZF1, KIF26B, MAST4, NELL1, OCA2, PDZRN4, PKHD1, PPARGC1A, PROS1, PXDNL, ROBO2, SCG3, SGCZ, SOD1, STXBP5L, SYK,
THOP1, THSD7B, TLN2, TRHDE, VCAM1, WDR27, XKR4
>58
ABCA10, ABCA12, ABCA13, ABCB1, ADCY8, AGXT, AKAP9, ANK3, BEND7, BMPR2, BNC2, BRAF, CASP8, CASR, CCDC178, CCDC7,
CCT8, CDH12, CFH, CNBD1, CNTLN, CNTN5, CNTNAP2, CPNE4, CRHR1, CTNND2, CUBN, DLGAP2, DNAJC13, DOCK4, DYSF, EGR2,
ERBB3, ERBB4, EVC, FAT4, FSTL4, GABRB3, GRID2, GRIK2, GRM5, HMCN1, HMGCR, KCNH8, KCTD16, LINGO2, LRRK2, MAST4,
MMP2, MTUS2, NCOA3, NFKB1, NPIIP1, NPR3, OPIIN1, PDPN, PDS5B, PKIID1, PXDNL, SARDII, SGCZ, SLC24A3, SLC6A3, SPRED2,
STXBP5L, SYNE2, TCHH, TDRKH, TENM2, TNNI3K, TUSC3, ULK4, UTRN, UVRAG, VAV3, VAX1
>59
ABCA10, ABCA12, ABCA13, ABCB1, ADCY8, AGXT, AKAP9, ANK3, BEND7, BMPR2, BNC2, BRAF, CASP8, CASR, CCDC178, CCDC7,
CCT8, CDII12, CFII, CNBD1, CNTLN, CNTN5, CNTNAP2, CPNE4, CRIIR1, CTNND2, CUBN, DLGAP2, DNAJC13, DOCK4, DYSF, EGR2,
ERBB3, ERBB4, EVC, FAT4, FSTL4, GABRB3, GRID2, GRIK2, GRM5, HMCN1, HMGCR, KCNH8, KCTD16, LINGO2, LRRK2, MAST4,
MTUS2, NCOA3, NFKB1, NPHP1, NPR3, OPHN1, PDPN, PDS5B, PKHD1, PXDNL, SARDH, SGCZ, SLC24A3, SLC6A3, SPRED2, STXBP5L,
SYNE2, TCHH, TDRKH, TENM2, TNNI3K, TUSC3, ULK4, UTRN, UVRAG, VAV3, VAX1
>60
ABCA13, ABCB1, ACSS2, ADAM23, ADH1C, ANKRD30A, ANKS1B, ATRX, BMPR2, BRAF, C12orf42, CASP8, CDH10, CDH12, CDH13,
CLN3, CNTN5, CNTNAP2, CPXCR1, CTNND2, CUBN, CXCL13, CYP19A1, CYP1A1, CYP3A5, DCC, DYSF, EPHX1, ERBB3, ERBB4,
FRAS1, FUT8, GABRA2, GABRB1, GABRB3, GABRG2, GMPR, GPC5, GRID2, GRM5, GRM8, HCN1, HPGD, HSD17B4, IL15, ITGAX,
KCNH8, KCTD16, KDM6A, KRT6B, LRRK2, MASP2, MB21D2, MMP2, NCOA3, NEK11, NFKB1, PDE4D, PIIACTR1, RIIAG, ROBO2,
SLC6A3, SQSTM1, STAG2, SYNE2, TCHH, TEK, TNFSF11, TRHDE, ULK4, UTRN, VCAM1
>61
ABCA13, ABCB1, ACSS2, ADAM23, ADH1C, ANKRD30A, ANKS1B, ATRX, BMPR2, BRAF, C12orf42, CASP8, CDH10, CDH12, CDH13,
CLN3, CNTN5, CNTNAP2, CPXCR1, CTNND2, CUBN, CXCL13, CYP19A1, CYP1A1, CYP3A5, DCC, DYSF, EPIIX1, ERBB3, ERBB4,
FRAS1, FUT8, GABRA2, GABRB1, GABRB3, GABRG2, GMPR, GPC5, GRID2, GRM5, GRM8, HCN1, HPGD, HSD17B4, IL15, ITGAX,
KCNH8, KCTD16, KDM6A, KRT6B, LMO1, LRRK2, MASP2, MB21D2, MMP2, NCOA3, NEK11, NFKB1, PDE4D, PHACTR1, RHAG,
ROBO2, SLC6A3, SQSTM1, STAG2, SYNE2, TCHH, TEK, TNFSF11, TRHDE, ULK4, UTRN, VCAM1
>62
ABCA10, ABCA12, ABCA13, ABCA4, ABCB1, ACADS, ACOT7, ACSL4, ACSS2, ADAM23, ADAMTS6, AGBL4, AGK, AGXT, AHI1, AKAP9,
ALG8, ALOX5, ANK3, ANKRD30A, ANKRD50, ANKS1B, ATRX, BMPR2, BNC2, BRAF, C12orf42, C4orf22, CAMKMT, CAPN3, CASP8,
CASR, CCDC178, CCDC7, CCSER1, CD22, CD28, CD2AP, CDH10, CDH13, CDH2, C`ES3, CFH, CNBD1, CNTLN, CNTN5, CNTNAP2, CPA4,
CPNE8, CTNNA3, CTNND2, CTSB, CUBN, CWC27, CYP19A1, CYP1A1, CYP3A5, DAB1, DCC, DDIT4, DNAH11, DNAH14, DNAJC13, DNM3,
DOCK4, DYM, DYSF, EGR2, EN1, EPHX1, EPHX2, ERBB3, ERBB4, ESRRG, FAT4, FEM1C, FGF14, FOXN3, FOXP2, FRAS1, FSTL4,
GABRB3, GPC5, GRIK2, GRM5, GRM8, GSTM2, HCN1, HMCN1, HMGCR, HMGN5, IL15, IL1RAPL1, IL1RAPL2, IQGAP2, ITGAM, ITGAX,
JAZF1, KCNH8, KCTD16, KCTD8, KDM6A, KIF26B, KRT6B, KRTAP9-9, LARS2, LDHC, LDLRAP1, LINGO2, LMO1, LRRK2, MASP2,
MAST4, MB21D2, MERTK, mir-548, MMP2, MTG1, MTUS2, NCOA3, NPHP1, NRG3, NSUN6, NUDT13, OCA2, OSBPL1A, OTOL1, PDE4D,
PDPN, PDS5B, PDZRN4, PEX5, PHACTR1, phosphate, PLOD2, PPP2R2B, PRKAG2, PTPN12, PTPN22, PTPRD, PTPRN2, PXDNL, RAPGEF2,
RAPSN, RNF19A, ROBO2, SCAPER, SH3RF3, SIL1, SLC24A3, SLCO3A1, SOD1, SPAG17, SQSTM1, STAG2, SYNE2, TCHH, TEK, TFEC,
THSD7B, TMC1, TNFSF11, TNN13K, TSC22D1, UGGT2, UTRN, VAX1, VCAM1, VPS13B, WDPCP, WWTR1, YTHDC2, ZNF608
>63
ABCA13, ABCB1, ADAM23, ADH1C, ANKRD30A, ANKS1B, ATRX, BMPR2, BRAF, C12orf42, CASP8, CDH10, CDH12, CDH13, CLN3,
CNTN5, CNTNAP2, CPXCR1, CTNND2, CUBN, CXCL13, CYP19A1, CYP1A1, DCC, DYSF, ERBB3, ERBB4, FRAS1, FUT8, GABRA2,
GABRB1, GABRB3, GABRG2, GMPR, GPC5, GR1D2, GRM5, GRM8, HCN1, HPGD, HSD17B4, IL15, ITGAX, KCNH8, KCTD16, KDM6A,
KRT6B, LRRK2, MASP2, MB21D2, MMP2, NCOA3, NEK11, NFKB1, PDE4D, PHACTR1, RHAG, ROBO2, SLC6A3, SQSTM1, STAG2, SYNE2,
TCHH, TEK, TNFSF11, TRHDE, ULK4, UTRN, VCAM1
>64
ABCA12, ADAM23, ADCY8, AKAP9, ANKRD30A, ANKS1B, ANO3, ATRX, BBS9, BRAF, CADM2, CASR, CCDC7, CDH10, CDH12, CDH2,
CNTLN, CNTN5, CNTNAP2, COL19A1, CRHR1, CRYM, CUBN, DISC1, DLD, DNAH11, DNAH14, DNAJC13, DNM3, DOCK4, DYSF, EMB,
EPHA7, ERBB3, ERBB4, ESRRG, EVC, EYS, FAF1, FANCI, FAT4, FRAS1, GABRA2, GABRB1, GABRB3, GALNT2, GLRA2, GRID2, GRIK2,
GRM4, GRM5, GYS2, HCN1, HIVEP1, HMCN1, HYOU1, IL1RAPL1, ITPR2, KIF26B, KRTAP9-4, LRRK2, MAST4, MCCC1, MTUS2, NPHP1,
NSUN6, OCA2, OPHN1, OTOL1, PDE4D, PDS5B, PHACTR1, PKHD1, PLCL1, PLOD2, PLXDC2, PTPRD, PXDNL, RAPGEF2, RHAG, ROBO2,
SCAPER, SH3RF3, SLC22A20, SLC37A2, SMOC2, STAG2, SYK, SYNE2, TENM2, TFEC, THSD7B, TLN2, TNNI3K, TRIM36, UTRN,
ZBTB49, ZFPM2
>65
ABCB1, ADCY8, AHI1, ALOX5, BRAF, CASR, CCDC7, CD28, CFH, CTNNA3, CTSB, CXCL13, CYBB, CYP19A1, CYP1A1, DCC, DYM,
EPHX2, EVC, FAF1, GABRA2, GABRB1, GABRB3, GABRG2, GALNT2, GRM8, HMGCR, HPGD, HTR3B, ICOS, IL15, LRRK2, MASP2,
MERTK, MMP2, NELL1, NFKB1, NKAIN2, OCA2, PDE11A, PDE4D, PPP2R2B, PTPN22, PTPRN2, RPL11, SIL1, SLC6A3, SYK, TBC1D32,
TENM4, THOP1, TNFSF11, TPST1, VAV3, VCAM1, YTHDC2
>66
ABCA13, ABCB1, ADAM23, ADH1C, ANKRD30A, ANKS1B, ATRX, BRAF, C12orf42, CASP8, CDH10, CDH12, CDH13, CLN3, CNTN5,
CNTNAP2, CPXCR1, CTNND2, CUBN, CYP19A1, DCC, DYSF, ERBB3, ERBB4, FRAS1, FUT8, GABRA2, GABRB1, GABRB3, GABRG2,
GMPR, GPC5, GRID2, GRM5, GRM8, HCN1, HPGD, HSD17B4, ITGAX, KCNH8, KCTD16, KDM6A, KRT6B, LRRK2, MASP2, MB21D2,
MMP2, NCOA3, NEK11, NFKB1, PHACTR1, RHAG, ROBO2, SLC6A3, STAG2, SYNE2, TCHH, TEK, TNFSF11, TRHDE, ULK4
>67
ABCA10, ABCA13, ADCY8, ANK3, BEND7, BNC2, BRAF, CASR, CCT8, CDH12, CFH, CNBD1, CNTLN, CNTN5, CNTNAP2, CPNE4,
CRHR1, CTNND2, CUBN, DLGAP2, DNAJC13, DYSF, EGR2, ERBB3, ERBB4, EVC, FAT4, FSTL4, GABRB3, GRID2, GRM5, HMCN1,
KCNH8, KCTD16, LINGO2, LRRK2, MAST4, MTUS2, NCOA3, NPHP1, NPR3, OPHN1, PKHD1, PXDNL, SARDH, SGCZ, SLC24A3, SLC6A3,
SPRED2, STXBP5L, SYNE2, TCHH, TDRKH, TENM2, TNNI3K, TUSC3, ULK4, UTRN, VAX1
>68
ABCA10, ABCA4, ABCB1, ABCC6, ACADS, adenosine triphosphate, AGXT, AHI1, ALDH5A1, ANK3, ARHGEF4, ATRX, BRAF, CASP8,
CCDC137, CCT8, CD22, CNTN5, CNTNAP2, CTNNA3, CTNND2, CYP19A1, CYP1A1, DISC1, DNAH14, EPHA7, EPHX2, ERBB3, ERBB4,
EYS, HTR3B, HYOU1, IL15, ITGAM, LRRK2, MASP2, MERTK, MMP2, MTUS2, NCOA3, NSUN3, OCA2, OSBPL1A, PDE4D, PDPN, PEX5,
PHACTR1, phosphate, PPARGC1A, PTPN12, PTPRN2, ROBO2, SEMA6D, SLC24A3, STAG2, STXBP5L, TCHH, TEK, TMC1, TNFSF11,
TNNI3K, TRIM5, VAV3, VPS13B, WDPCP, WDR27
>69
ABCA10, ABCA12, ABCA13, ABCB1, ACOT7, ACSL4, ADAM23, AGBL4, AGXT, AHI1, AKAP9, ALG8, ANK3, ANKRD30A, ANKRD50,
ATRX, BMPR2, BNC2, BRAF, C4orf22, CASP8, CASR, CCDC178, CCDC7, CCSER1, CD22, CD2AP, CDH10, CDH13, CDH2, CES3,
CNBD1, CNTLN, CNTN5, CNTNAP2, CPA4, CPNE8, CTNNA3, CTNND2, CUBN, CWC27, DAB1, DCC, DNAH11, DNAH14, DNM3,
DOCK4, DYM, DYSF, EGR2, EN1, EPHX1, EPHX2, ERBB3, ERBB4, FAT4, FEM1C, FGF14, FOXN3, FOXP2, FRAS1, FSTL4, GABRB3,
GPC5, GRIK2, GRM5, GRM8, HCN1, HMCN1, HMGN5, IL1RAPL2, IQGAP2, ITGAX, JAZF1, KCNH8, KCTD16, KCTD8, KIF26B, KRT6B,
LARS2, LDHC, LDLRAP1, LINGO2, LRRK2, MB21D2, MMP2, MTG1, MTUS2, NCOA3, NPHP1, NRG3, NSUN6, OCA2, OSBPL1A,
OTOL1, PDS5B, PDZRN4, PEX5, PHACTR1, PLOD2, PPP2R2B, PTPRN2, PXDNL, RAPGEF2, RAPSN, RNF19A, ROBO2, SCAPER,
SH3RF3, SLC24A3, SLCO3A1, SPAG17, SQSTM1, STAG2, SYNE2, TCHH, TEK, TFEC, THSD7B, TMC1, TNNI3K, TSC22D1, UGGT2,
UTRN, VAX1, VCAM1, VPS13B, WDPCP, WWTR1, YTHDC2, ZNF608
>70
ABCA10, ABCA13, ADCY8, ANK3, BEND7, BNC2, BRAF, CASP8, CASR, CCT8, CDH12, CFH, CNBD1, CNTLN, CNTN5, CNTNAP2, CPNE4,
CRHR1, CTNND2, CUBN, DLGAP2, DNAJC13, DYSF, EGR2, ERBB3, ERBB4, EVC, FAT4, FSTL4, GABRB3, GRID2, GRM5, HMCN1,
KCNH8, KCTD16, LINGO2, LRRK2, MAST4, MTUS2, NCOA3, NPHP1, NPR3, OPHN1, PKHD1, PXDNL, SARDH, SGCZ, SLC24A3, SLC6A3,
SPRED2, STXBP5L, SYNE2, TCHH, TDRKH, TENM2, TNNI3K, TUSC3, ULK4, UTRN, VAX1
>71
ABCA13, ABCB1, ADAM23, ADH1C, ANKRD30A, ANKS1B, ATRX, BRAF, C12orf42, CASP8, CDH10, CDH12, CDH13, CLN3, CNTN5,
CNTNAP2, CPXCR1, CTNND2, CUBN, CYP19A1, DCC, DYSF, ERBB3, ERBB4, FRAS1, FUT8, GABRA2, GABRB1, GABRB3, GABRG2,
GMPR, GPC5, GRID2, GRM5, GRM8, HCN1, HPGD, HSD17B4, ITGAX, KCNH8, KCTD16, KDM6A, KRT6B, LRRK2, MASP2, MB21D2,
MMP2, NCOA3, NEK11, NFKB1, PHACTR1, RHAG, ROBO2, SLC6A3, STAG2, SYNE2, TCHH, TEK, TNFSF11, TRHDE, ULK4, VCAM1
>72
ABCA10, ABCA12, ABCA13, ABCB1, ACOT7, ACSL4, ADAM23, AGBL4, AGXT, AHI1, AKAP9, ALG8, ANK3, ANKRD30A, ANKRD50,
ATRX, BMPR2, BNC2, BRAF, C4orf22, CASP8, CASR, CCDC178, CCDC7, CCSER1, CD22, CD2AP, CDH10, CDH13, CDH2, CES3,
CNBD1, CNTLN, CNTN5, CNTNAP2, CPA4, CPNE8, CTNNA3, CTNND2, CUBN, CWC27, DAB1, DCC, DNAH11, DNAH14, DNM3,
DOCK4, DYM, DYSF, EGR2, EN1, EPHX2, ERBB3, ERBB4, FAT4, FEM1C, FGF14, FOXN3, FOXP2, FRAS1, FSTL4, GABRB3, GPC5,
GRIK2, GRM5, GRM8, HCN1, HMCN1, HMGN5, IQGAP2, ITGAX, JAZF1, KCNH8, KCTD16, KCTD8, KIF26B, KRT6B, LARS2, LDHC,
LDLRAP1, LINGO2, LRRK2, MB21D2, MTG1, MTUS2, NPHP1, NRG3, NSUN6, OCA2, OSBPL1A, OTOL1, PDS5B, PDZRN4, PEX5,
PHACTR1, PLOD2, PPP2R2B, PTPRN2, PXDNL, RAPGEF2, RAPSN, RNF19A, ROBO2, SCAPER, SH3RF3, SLC24A3, SLCO3A1,
SPAG17, SQSTM1, SYNE2, TCHH, TEK, TFEC, TIISD7B, TMC1, TNNI3K, TSC22D1, UGGT2, UTRN, VAX1, VCAM1, VPS13B, WDPCP,
WWTR1, YTIIDC2, ZNF608
>73
ABCA10, ABCA4, ABCB1, ABCC6, ACADS, adenosine triphosphate, AGXT, AHI1, ALDH5A1, ANK3, ARHGEF4, ATRX, BRAF, CASP8,
CCDC137, CCT8, CD22, CFH, CNTN5, CNTNAP2, COL19A1, CTNNA3, CTNND2, CYP19A1, CYP1A1, DISC1, DNAH14, EPHA7, EPHX2,
ERBB3, ERBB4, ESRRG, EYS, IITR3B, IIYAL1, IIYOU1, IL15, ITGAM, LRRK2, MASP2, MERTK, MMP2, MTUS2, NCOA3, NSUN3, OCA2,
OSBPL1A, PDE4D, PDPN, PDS5B, PEX5, PHACTR1, phosphate, PPARGC1A, PRPF8, PTPN12, PTPRN2, ROBO2, SEMA6D, SLC24A3,
STAG2, STXBP5L, TCHH, TEK, TMC1, TNFSF11, TNNI3K, TRIM5, UTRN, VAV3, VPS13B, WDPCP, WDR27, ZFPM2
>74
ABCA10, ABCA12, ABCA13, ABCB1, ACSL4, ADAM23, AGBL4, AGXT, AIII1, AKAP9, ALG8, ANK3, ANKRD30A, ANKRD50, ATRX,
BMPR2, BNC2, BRAF, C4orf22, CASP8, CASR, CCDC178, CCDC7, CCSER1, CD22, CD2AP, CDH10, CDH13, CDH2, CESS, CNBD1,
CNTLN, CNTN5, CNTNAP2, CPA4, CPNE8, CTNNA3, CTNND2, CUBN, CWC27, DAB1, DCC, DNAH11, DNAH14, DNM3, DOCK4, DYM,
DYSF, EGR2, EN1, EPHX1, EPHX2, ERBB3, ERBB4, FAT4, FEM1C, FGF14, FOXN3, FOXP2, FRAS1, FSTL4, GABRB3, GPC5, GRIK2,
GRM5, GRM8, HCN1, IIMCN1, IIMGN5, IL1RAPL2, IQGAP2, ITGAX, JAZF1, KCNII8, KCTD16, KCTD8, KIF26B, KRT6B, LARS2, LDIIC,
LDLRAP1, LINGO2, LRRK2, MB21D2, MTG1, MTUS2, NCOA3, NPHP1, NRG3, NSUN6, OCA2, OSBPL1A, OTOL1, PDS5B, PDZRN4,
PHACTR1, PLOD2, PPP2R2B, PTPRN2, PXDNL, RAPGEF2, RAPSN, RNF19A, ROBO2, SCAPER, SH3RF3, SLC24A3, SLCO3A1,
SPAG17, SQSTM1, SYNE2, TCHH, TEK, TFEC, THSD7B, TMC1, TNNI3K, TSC22D1, UGGT2, UTRN, VAX1, VCAM1, VPS13B, WDPCP,
WWTR1, YTHDC2, ZNF608
>75
ABCA10, ABCA4, ABCB1, ABCC6, ACADS, AGXT, AHI1, ALDH5A1, ANK3, ARHGEF4, BRAF, CCDC137, CCT8, CD22, CNTNAP2, CTNNA3,
CTNND2, CYP1A1, DISC1, DNAH14, EPHA7, EPHX2, ERBB3, HTR3B, HYOU1, ITGAM, LRRK2, MERTK, NCOA3, NSUN3, OCA2,
OSBPL1A, PHACTR1, PPARGC1A, PTPN12, PTPKN2, ROBO2, SLC24A3, STXBP5L, TCHH, TMC1, TRIM5, VAV3, VPS13B, WDPCP, WDR27
>76
ABCA10, ABCA12, ABCA13, ABCB1, ACSL4, ADAM23, AGBL4, AGXT, AHI1, AKAP9, ALG8, ANK3, ANKRD30A, ANKRD50, ATRX,
BMPR2, BNC2, BRAF, C4orf22, CASP8, CASR, CCDC178, CCDC7, CCSER1, CD22, CD2AP, CDH10, CDH13, CDH2, CES3, CNBD1,
CNTLN, CNTN5, CNTNAP2, CPA4, CPNE8, CTNNA3, CTNND2, CUBN, CWC27, DAB1, DNAH11, DNAH14, DNM3, DOCK4, DYM,
DYSF, EGR2, EN1, EPHX2, ERBB3, ERBB4, FAT4, FEM1C, FGF14, FOXN3, FOXP2, FRAS1, FSTL4, GABRB3, GPC5, GRIK2, GRM5,
GRM8, HCN1, HMCN1, HMGN5, IQGAP2, ITGAX, JAZF1, KCNH8, KCTD16, KCTD8, KIF26B, KRT6B, LARS2, LDHC, LDLRAP1, LINGO2,
LRRK2, MB21D2, MTG1, MTUS2, NPHP1, NRG3, NSUN6, OCA2, OSBPL1A, OTOL1, PDS5B, PDZRN4, PHACTR1, PLOD2, PPP2R2B,
PTPRN2, PXDNL, RAPGEF2, RAPSN, KNF19A, KOBO2, SCAPER, SH3RF3, SLC24A3, SLCO3A1, SPAG17, SQSTM1, SYNE2, TCHH,
TEK, TFEC, THSD7B, TMC1, TNNI3K, TSC22D1, UGGT2, UTRN, VAX1, VCAM1, VPS13B, WDPCP, WWTR1, YTHDC2, ZNF608
>77
ABCA10, ABCA12, ABCA13, ABCB1, ACSL4, ADAM23, AGBL4, AGXT, AHI1, AKAP9, ALG8, ANK3, ANKRD30A, ANKRD50, ATRX,
BMPR2, BNC2, BRAF, C4orf22, CASP8, CASR, CCDC178, CCDC7, CCSER1, CD22, CD2AP, CDH10, CDH13, CDH2, CES3, CNBD1,
CNTLN, CNTN5, CNTNAP2, CPA4, CPNE8, CTNNA3, CTNND2, CUBN, CWC27, DAB1, DNAH11, DNAH14, DNM3, DOCK4, DYM,
DYSF, EGR2, EN1, EPHX1, EPHX2, ERBB3, ERBB4, FAT4, FEM1C, FGF14, FOXN3, FOXP2, FRAS1, FSTL4, GABRB3, GPC5, GRIK2,
GRM5, GRM8, HCN1, HMCN1, HMGN5, IL1RAPL2, IQGAP2, ITGAX, JAZF1, KCNH8, KCTD16, KCTD8, KIF26B, KRT6B, LARS2, LDHC,
LDLRAP1, LINGO2, LRRK2, MB21D2, MTG1, MTUS2, NCOA3, NPHP1, NRG3, NSUN6, OCA2, OSBPL1A, OTOL1, PDS5B, PDZRN4,
PHACTR1, PLOD2, PPP2R2B, PTPRN2, PXDNL, RAPGEF2, RAPSN, RNF19A, ROBO2, SCAPER, SH3RF3, SLC24A3, SLCO3A1,
SPAG17, SQSTM1, SYNE2, TCHH, TEK, TFEC, THSD7B, TMC1, TNNI3K, TSC22D1, UGGT2, UTRN, VAX1, VCAM1, VPS13B, WDPCP,
WWTR1, YTHDC2, ZNF608
>78
ABCA10, ABCA4, ABCB1, ABCC6, ACADS, adenosine triphosphate, AGXT, AHI1, ALDH5A1, ANK3, ARHGEF4, ATRX, BRAF, CASP8,
CCDC137, CCT8, CD22, CNTN5, CNTNAP2, CTNNA3, CTNND2, CYP19A1, CYP1A1, DISC1, DNAH14, EPHA7, EPHX2, ERBB3, ERBB4,
EYS, HTR3B, HYOU1, IL15, ITGAM, LRRK2, MASP2, MERTK, MMP2, MTUS2, NCOA3, NSUN3, OCA2, OSBPL1A, PDE4D, PDPN, PEX5,
PHACTR1, phosphate, PPARGC1A, PTPN12, PTPRN2, ROBO2, SEMA6D, SLC24A3, STAG2, STXBP5L, TCHH, TMC1, TNFSF11, TNNI3K,
TRIM5, VAV3, VPS13B, WDPCP, WDR27
>79
ABCA10, ABCA4, ABCB1, ABCC6, ACADS, adenosine triphosphate, AGXT, AHI1, ALDH5A1, ANK3, ARHGEF4, ATRX, BRAF, CASP8,
CCDC137, CCT8, CD22, CNTN5, CNTNAP2, CTNNA3, CTNND2, CYP19A1, CYP1A1, DISC1, DNAH14, EPHA7, EPHX2, ERBB3, ERBB4,
EYS, HTR3B, HYOU1, IL15, ITGAM, LRRK2, MASP2, MERTK, MMP2, MTUS2, NCOA3, NSUN3, OCA2, OSBPL1A, PDE4D, PDPN, PEX5,
PHACTR1, phosphate, PPARGC1A, PTPN12, PTPRN2, ROBO2, SEMA6D, SLC24A3, STAG2, STXBP5L, TCHH, TMC1, TNNI3K, TRIM5,
VAV3, VPS13B, WDPCP, WDR27
>80
ABCA10, ABCA12, ABCA13, ABCB1, ACOT7, ACSL4, ADAM23, AGBL4, AGXT, AHI1, AKAP9, ALG8, ANK3, ANKRD30A, ANKRD50,
ATRX, BMPR2, BNC2, BRAF, C4orf22, CASP8, CASR, CCDC178, CCDC7, CCSER1, CD22, CD2AP, CDH10, CDH13, CDH2, CES3,
CNBD1, CNTLN, CNTN5, CNTNAP2, CPA4, CPNE8, CTNNA3, CTNND2, CTSB, CUBN, CWC27, DAB1, DCC, DNAH11, DNAH14,
DNM3, DOCK4, DYM, DYSF, EGR2, EN1, EPHX2, ERBB3, ERBB4, FAT4, FEM1C, FGF14, FOXN3, FOXP2, FRAS1, FSTL4, GABRB3,
GPC5, GRIK2, GRM5, GRM8, HCN1, HMCN1, HMGN5, HPGD, IQGAP2, ITGAX, JAZF1, KCNH8, KCTD16, KCTD8, KIF26B, KRT6B,
LARS2, LDHC, LDLRAP1, LINGO2, LRRK2, MB21D2, MMP2, MTG1, MTUS2, NPHP1, NRG3, NSUN6, OCA2, OSBPL1A, OTOL1, PDPN,
PDS5B, PDZRN4, PEX5, PHACTR1, PLOD2, PPP2R2B, PTPN12, PTPRN2, PXDNL, RAPGEF2, RAPSN, RNF19A, ROBO2, SCAPER,
SH3RF3, SLC24A3, SLCO3A1, SPAG17, SQSTM1, SYNE2, TCHH, TEK, TFEC, THSD7B, TMC1, TNNI3K, TSC22D1, UGGT2, UTRN,
VAX1, VCAM1, VPS13B, WDPCP, WWTR1, YTHDC2, ZNF608
>81
ABCA10, ABCA12, ABCA13, ABCB1, ACADS, ACOT7, ACSL4, ADAM23, AGBL4, AGXT, AHI1, AKAP9, ALG8, ALOX5, ANK3, ANKRD30A,
ANKBD50, ATRX, BMPR2, BNC2, BRAF, C4orf22, CAPN3, CASP8, CASR, CCDC178, CCDC7, CCSER1, CD22, CD28, CD2AP, CDH10,
CDH13, CDH2, CES3, CFH, CNBD1, CNTLN, CNTN5, CNTNAP2, CPA4, CPNE8, CTNNA3, CTNND2, CTSB, CUBN, CWC27, DAB1, DCC,
DNAH11, DNAH14, DNM3, DOCK4, DYM, DYSF, EGR2, EN1, EPHX1, EPHX2, ERBB3, ERBB4, FAT4, FEM1C, FGF14, FOXN3, FOXP2,
FRAS1, FSTL4, GABRB3, GPC5, GRIK2, GRM5, GRM8, HCN1, HMCN1, HMGCR, HMGN5, HPGD, IL15, IL1RAPL2, IQGAP2, ITGAM,
ITGAX, JAZF1, KCNH8, KCTD16, KCTD8, KIF26B, KRT6B, LARS2, LDHC, LDLRAP1, LINGO2, LRRK2, MASP2, MB21D2, MERTK, mir-
548, MMP2, MTG1, MTUS2, NCOA3, NPHP1, NRG3, NSUN6, OCA2, OSBPL1A, OTOL1, PDE4D, PDPN, PDS5B, PDZRN4, PEX5, PHACTR1,
phosphate, PLOD2, PPP2R2B, PTPN12, PTPRN2, PXDNL, RAPGEF2, RAPSN, RNF19A, ROBO2, SCAPER, SH3RF3, SLC24A3, SLCO3A1,
SPAG17, SQSTM1, STAG2, SYNE2, TCHH, TEK, TFEC, THSD7B, TMC1, TNNI3K, TSC22D1, UGGT2, UTRN, VAX1, VCAM1, VPS13B,
WDPCP, WWTR1, YTHDC2, ZNF608
>82
ADCY8, adenosine triphosphate, ADGRB3, BRAF, CASR, CHRNA7, CLN3, CNTNAP2, CRHR1, CTNND2, CTSB, CYBB, CYP19A1, DCC,
DISC1, DMRTA1, DNM3, EGR2, EN1, EPHX2, ERBB4, GABRB3, GABRG2, GRID1, GRID2, GRIK2, GRM4, GRM5, GRM8, HCN1, HMGCR,
HSD17B4, IL15, ITGA8, ITPR2, KHT6B, LALBA, LHX8, LRRK2, NFKB1, NPR3, OPHN1, PDE11A, PDE4D, PPARGC1A, PPP1R14C, PPT1,
PTPRN2, RNF180, ROBO2, SLC6A3, SOD1, SQSTM1, TPST1, VCAM1
>83
ABCA12, ABCA4, ABCC6, ADGRV1, AHI1, ANK3, ASIC2, BARX1, BRAF, CFH, CHRNA7, CLN3, CNTNAP2, CTSB, CYP19A1, DAB1, DCC,
EGR2, EN1, EPHA7, ERBB3, ERBB4, FAT4, GABRB3, GRID2, ILIRAPL1, ITGA8, KRT6B, LHX8, MERTK, MMP2, NFKB1, NPHP1, NPR3,
OPHN1, PDS5B, PEX5, PPARGC1A, PPT1, PROS1, ROBO2, SC5D, SLC6A3, SOD1, TENM2, TNFSF11, ULK4, VAX1, WDPCP
>84
ABCA10, ABCA12, ABCA13, ABCB1, ACADS, ACOT7, ACSL4, ADAM23, AGBL4, AGXT, AHI1, AKAP9, ALG8, ALOX5, ANK3, ANKRD30A,
ANKRD50, ATRX, BMPR2, BNC2, BRAF, C4orf22, CAPN3, CASP8, CASR, CCDC178, CCDC7, CCSER1, CD22, CD28, CD2AP, CDH10,
CDH13, CDH2, CES3, CFH, CNBD1, CNTLN, CNTN5, CNTNAP2, CPA4, CPNE8, CTNNA3, CTNND2, CTSB, CUBN, CWC27, DAB1, DCC,
DNAH11, DNAH14, DNM3, DOCK4, DYM, DYSF, EGR2, EN1, EPHX1, EPHX2, ERBB3, ERBB4, FAT4, FEM1C, FGF14, FOXN3, FOXP2,
FRAS1, FSTL4, GABRB3, GPC5, GRIK2, GRM5, GRM8, HCN1, HMCN1, HMGCR, HMGN5, IL15, IL1RAPL2, IQGAP2, ITGAM, ITGAX,
JAZF1, KCNH8, KCTD16, KCTD8, KIF26B, KRT6B, LARS2, LDHC, LDLRAP1, LINGO2, LRRK2, MASP2, MB21D2, MERTK, mir-548, MMP2,
MTG1, MTUS2, NCOA3, NPHP1, NRG3, NSUN6, OCA2, OSBPL1A, OTOL1, PDE4D, PDS5B, PDZRN4, PEX5, PHACTR1, phosphate,
PLOD2, PPP2R2B, PTPN12, PTPRN2, PXDNL, RAPGEF2, RAPSN, RNF19A, ROBO2, SCAPER, SH3RF3, SLC24A3, SLCO3A1, SPAG17,
SQSTM1, STAG2, SYNE2, TCHH, TEK, TFEC, THSD7B, TMC1, TNNI3K, TSC22D1, UGGT2, UTRN, VAX1, VCAM1, VPS13B, WDPCP,
WWTR1, YTHDC2, ZNF608
>85
adenosine triphosphate, ADGRB3, AHI1, AKAP9, ANK3, ARHGAP24, ARHGEF4, BBS5, BBS9, BRAF, CD2AP, CDH13, CDH2, CNTNAP2,
CRHR1, CTNND2, CYP19A1, DAB1, DCC, DDAH1, DISC1, DNM3, EPHA7, EPHX2, ERBB4, FUT8, GRID2, GRM4, GRM5, ICOS, ILIRAPL1,
LRRK2, NFKB1, OPIIN1, PARD3, PDPN, PKIID1, PTPN20, RAPGEF2, RAPSN, RIT2, ROBO2, SOD1, SYK, TBC1D32, TENM4, TNFSF11,
ULK4, VAV3, WDPCP, WWTR1
>86
ADAMTS6, AHI1, CAPN3, CASP8, CD22, CD28, CFH, CNTNAP2, COL19A1, CPNE4, CTSB, CXCL13, CYBB, CYP19A1, DAB1, DDAH1,
DLGAP2, DYM, ERBB3, FGF14, FSTL4, GABRA2, GABRB1, GABRB3, GABRG2, GRIK2, IICN1, HMGCR, IIPGD, IITR3B, IIYAL1, ICOS,
IL15, ITGAM, ITGAX, JAZF1, KCNE1, KCTD16, LARS2, MERTK, NFKB1, NRG3, PDE11A, PDE4D, phosphate, PPP2R2B, PTPN22, PXDNL,
ROBO2, RTP4, SGCZ, SLC6A3, SOD1, SQSTM1, TEK, TNFSF11, TUSC3, VCAM1
>87
ABCA10, ABCA4, ABCB1, ABCC6, ACADS, AGXT, AIII1, ALDII5A1, ANK3, ARIIGEF4, BRAF, CCDC137, CCT8, CD22, CFII, CNTNAP2,
CTNNA3, CTNND2, CYP19A1, CYP1A1, DISC1, DNAH14, EPHA7, EPHX2, ERBB3, ERBB4, ESRRG, EYS, HTR3B, HYAL1, HYOU1, ITGAM,
LRRK2, MASP2, MERTK, MMP2, MTUS2, NCOA3, NSUN3, OCA2, OSBPL1A, PDS5B, PHACTR1, PPARGC1A, PRPF8, PTPN12, PTPRN2,
ROBO2, SEMA6D, SLC24A3, STXBP5L, TCHH, TMC1, TRIM5, UTRN, VAV3, VPS13B, WDPCP, WDR27
>88
ABCB1, ADAMTS6, ADCY8, AHI1, ALOX5, CASP8, CCDC7, CD22, CD28, CFH, CTNNA3, CTSB, CXCL13, CYBB, CYP19A1, DYM, EGR2,
EPHX2, ERBB3, EVC, FAF1, FGF14, FSTL4, GABEA2, GABRB1, GABRB3, GABRG2, GALNT2, HMGCR, HTR3B, ICOS, IL15, ITGAM,
ITGAX, LRRK2, MERTK, MMP2, NELL1, NFKB1, NRG3, OCA2, PDE11A, PDE4D, PPP2R2B, PTPN22, PTPRN2, PXDNL, RPL11, RTP4,
SGCZ, SIL1, SYK, TNFSF11, TPST1, VCAM1, YTIIDC2
>89
ABCA12, ABCA4, ABCC6, ADGRV1, AHI1, ANK3, ASIC2, BARX1, BRAF, CFH, CHRNA7, CLN3, CNTNAP2, CTSB, CYP19A1, DAB1, DCC,
EGR2, EN1, EPHA7, ERBB3, ERBB4, FAT4, GABRB3, GH1D1, GR1D2, ILIRAPLI, 1TGA8, KKT6B, LHX8, MERTK, MMP2, NFKB1, NPHP1,
NPR3, OPHN1, PDS5B, PEX5, PPARGC1A, PPT1, PROS1, ROBO2, SC5D, SLC6A3, SOD1, TENM2, TNFSF11, ULK4, VAX1, WDPCP
>90
ABCA10, ABCA4, ABCB1, ABCC6, ACADS, AGXT, AHI1, ALDH5A1, ANK3, ARHGEF4, BRAF, CCDC137, CCT8, CD22, CNTNAP2, CTNNA3,
CTNND2, CYP19A1, CYP1A1, DISC1, DNAH14, EPHA7, EPHX2, ERBB3, EYS, HTR3B, HYOL1, ITGAM, LRRK2, MASP2, MERTK, MTUS2,
NCOA3, NSUN3, OCA2, OSBPL1A, PHACTR1, PPARGC1A, PTPN12, PTPRN2, ROBO2, SEMA6D, SLC24A3, STXBP5L, TCHH, TMC1,
TRIM5, VAV3, VPS13B, WDPCP, WDR27
>91
ABCA10, ABCA12, ABCA13, ABCB1, ACOT7, ACSL4, ADAM23, AGBL4, AGXT, AH11, AKAP9, ALG8, ANK3, ANKRD30A, ANKRD50,
ATRX, BMPR2, BNC2, BRAF, C4orf22, CASP8, CASR, CCDC178, CCDC7, CCSER1, CD22, CD2AP, CDH10, CDH13, CDH2, CES3,
CNBD1, CNTLN, CNTN5, CNTNAP2, CPA4, CPNE8, CTNNA3, CTNND2, CTSB, CUBN, CWC27, DAB1, DCC, DNAH11, DNAH14,
DNM3, DOCK4, DYM, DYSF, EGR2, EN1, EPHX2, ERBB3, ERBB4, FAT4, FEM1C, FGF14, FOXN3, FOXP2, FRAS1, FSTL4, GABRB3,
GPC5, GRIK2, GRM5, GRM8, HCN1, HMCN1, HMGN5, 1QGAP2, ITGAX, JAZF1, KCNH8, KCTD16, KCTD8, KIF26B, KRT6B, LARS2,
LDHC, LDLRAP1, L1NGO2, LRRK2, MB21D2, MMP2, MTG1, MTUS2, NPHP1, NRG3, NSUN6, OCAS, OSBPL1A, OTOL1, PDS5B,
PDZRN4, PEX5, PHACTR1, PLOD2, PPP2R2B, PTPN12, PTPRN2, PXDNL, RAPGEF2, RAPSN, RNF19A, ROBO2, SCAPER, SH3RF3,
SLC24A3, SLCO3A1, SPAG17, SQSTM1, SYNE2, TCHH, TEK, TFEC, THSD7B, TMC1, TNNI3K, TSC22D1, UGGT2, UTRN, VAX1,
VCAM1, VPS13B, WDPCP, WWTR1, YTHDC2, ZNF608
>92
adenosine triphosphate, ADGRB3, ADGRL2, AHI1, ALOX5, ANK3, ARHGAP24, ASIC2, ATRX, BMPR2, BRAF, CASP8, CD28, CDH13, CDH2,
CHRNA7, CNTNAP2, CRHR1, CTNND2, CTSB, CYBB, CYP19A1, CYP1A1, DAB1, DCC, DDAH1, DDIT4, DISC1, DNM3, EGR2, EN1,
EPHA7, EPHX2, ERBB3, ERBB4, FOXP2, FUT8, GABRB3, GABRG2, GRID2, GRM4, GRM5, HCN1, HSD17B4, ICOS, IL15, IL1RAPL1,
IMMP2L, LHX8, LINGO2, LMO1, LRRK2, MERTK, MMP2, NCOA3, NFKB1, NRG3, OCA2, OPHN1, PARD3, PPARGC1A, PPT1, PROS1,
PTPN20, PTPN22, RAB28, RAPGEF2, RAPSN, RHAG, RILPL2, RIT2, RNASE10, ROBO2, SMOC2, SOD1, SQSTM1, STAM, SYK, TDRKH,
TEK, TENM4, TNFSF11, UTRN, UVRAG, VAV3, VCAM1, VWC2, ZFPM2
>93
ABCA10, ABCA4, ABCB1, ABCC6, ACADS, AGXT, AHI1, ALDH5A1, ANK3, ARHGEF4, BRAF, CCDC137, CCT8, CD22, CNTNAP2, CTNNA3,
CTNND2, CYP1A1, DISC1, DNAH14, EPHA7, EPHX2, ERBB3, EYS, HTR3B, HYOU1, ITGAM, LRRK2, MASP2, MERTK, MTUS2, NCOA3,
NSUN3, OCA2, OSBPL1A, PHACTR1, PPARGC1A, PTPN12, PTPRN2, ROBO2, SEMA6D, SLC24A3, STXBP5L, TCHH, TMC1, TRIM5, VAV3,
VPS13B, WDPCP, WDR27
>94
ABCB1, adenosine triphosphate, ALDH5A1, ANK3, C4orf22, CHRNA7, CNBD1, CRHR1, CYP19A1, CYP1A1, GABRA2, GABRB1, GABRB3,
GABRG2, GRID1, GRIK2, GRM4, GRM5, HMGCR, HTR3B, ITPR2, MCCC1, NEK11, NKAIN2, PDE11A, phosphate, SLC6A3, SYK, TENM4,
VPS13B
>95
ABCA4, AHI1, ANK3, ASIC2, BRAF, CDH2, CFH, CHRNA7, CLN3, CNTNAP2, CTSB, DAB1, DCC, DNM3, EGR2, EN1, EPHA7, ERBB3,
ERBB4, GABRB3, GRID1, GRID2, GRM5, IL1RAPL1, LHX8, LRRK2, MERTK, NFKB1, OPHN1, PARD3, PDS5B, PEX5, PPARGC1A, PPT1,
PROS1, RAPSN, ROBO2, SLC6A3, SOD1, SYNE2, TENM2, ULK4, UTRN, VAX1, XK
>96
ABCA4, AHI1, ANK3, ASIC2, BRAF, CFH, CHRNA7, CLN3, CNTNAP2, CTSB, DAB1, DCC, DNM3, EGR2, EN1, EPHA7, ERBB3, ERBB4,
GABRB3, GRID2, IL1RAPL1, LHX8, LRRK2, MERTK, NFKB1, OPHN1, PARD3, PDS5B, PEX5, PPARGC1A, PPT1, PROS1, RAPSN, ROBO2,
SLC6A3, SOD1, SYNE2, TENM2, ULK4, UTRN, VAX1, XK
>97
ABCA10, ABCA12, ABCA4, ACADS, ACSS2, ADAM23, ADAMTS6, AGK, AKAP9, ANKRD30A, ANKS1B, ANO3, ATRX, BMPR2, BRAF,
C12orf42, CAMKMT, CASP8, CCDC7, CD22, CDH10, CDH2, CFH, CNTLN, CNTNAP2, CTNND2, CUBN, CYP19A1, DNAH11, DNAH14,
DNAJC13, DNM3, DYSF, EGR2, EN1, EPHX1, ERBB3, ERBB4, ESRRG, EVC, FAM122C, FAT4, FRAS1, GRID1, GRIK2, GRM8, HIVEP1,
HMCN1, HMGN5, IL1RAPL1, ITGAX, KCNH8, KCTD16, KDM6A, KRT6B, KRTAP9-9, LINGO2, LRRK2, MAST4, MB21D2, MCCC1, MMP2,
MTUS2, NCOA3, NUDT13, OCA2, OPHN1, OSBPL1A, PDS5B, PHACTR1, PKHD1, PRKAG2, PTPN22, PTPRD, PTPRN2, PXDNL, ROBO2,
SLC25A12, SLCO3A1, SOD1, STAG2, TCHH, TENM2, THSD7B, TLN2, TRHDE, TRIM36, ULK4, UTRN, VAV3, VPS13B, WDPCP, WWTR1,
ZFPM2, ZNF608, ZPLD1
>98
ABCA12, ABCA4, ABCC6, ACADS, ACADSB, ADGRV1, AGK, AHI1, ANK3, BBS5, BBS9, CAPN3, CLN3, CYBB, DYSF, EGR2, EYS, FAT4,
GRID2, GRIK2, HMGCR, HPGD, HSD17B4, KCNE1, KLHL3, LARS2, LBR, LDLRAP1, MASP2, MCCC1, MERTK, MFSD8, MMP2, NPHP1,
OCA2, P3H1, PEX5, PKHD1, PLOD2, PROS1, RAB28, RHAG, SOD1, SQSTM1, TMC1, TNFSF11, TUSC3, VAX1, WDPCP, XYLT1
>99
adenosine triphosphate, ADGRB3, ADGRL2, ANK3, ASIC2, BRAF, CDH2, CHRNA7, CNTNAP2, CRHR1, CTNND2, CYP19A1, DAB1, DCC,
DDAH1, DISC1, DNM3, EGR2, EN1, EPHA7, ERBB3, ERBB4, FUT8, GABRB3, GABRG2, GRID2, GRM4, GRM5, ILIEAPL1, LHX8, LINGO2,
LRRK2, NFKB1, OPHN1, PARD3, PPT1, PTPN20, RAPGEF2, RAPSN, RIT2, ROBO2, SOD1, STAM, TENM4, UTRN
>100
ABCA12, ABCB1, ADAM23, ADGRV1, ADH1C, AHI1, AKAP9, ALDH5A1, ALOX5, ANK3, BARX1, BMPR2, BRAF, CASP8, CASR, CD22,
CD28, CD2AP, CDH2, CFH, CHRNA7, CLN3, COL19A1, CRHR1, CTNNA3, CTSB, CYBB, CYP1A1, DAB1, DCC, DDAH1, DLD, DNM3,
EGR2, EN1, ERBB3, ERBB4, ESRRG, FAT4, FUT8, GABRA2, GABRB3, GABRG2, GRID2, HMGCR, HPGD, HSD17B4, HYOU1, ICOS, IL15,
IQGAP2, ITGA8, ITGAM, ITPR2, KDM6A, KRT6B, LHX8, LMO1, LRRK2, MERTK, MMP2, NCOA3, NFKB1, NPR3, OPHN1, PARD3, PDPN,
PDS5B, PEX5, PLCL1, PPARGC1A, PPP1R14C, PPT1, PROS1, PRPF8, PTPN12, PTPRN2, RAPGEF2, RAPSN, ROBO2, SC5D, SLC6A3,
SOD1, SPRED2, SQSTM1, STAM, SYK, SYNE2, TEK, TNFSF11, ULK4, UTRN, VAV3, VAX1, VCAM1, WDPCP, ZFPM2
>101
ABCA10, ABCA12, ABCA13, ABCA4, ABCB1, ACADSB, AHI1, ANK3, ANKRD30A, ARHGAP24, BMPR2, BRAF, CCDC7, CD22, CD28,
CDH10, CFH, CNTLN, CNTN5, CNTNAP2, CTNNA3, CTNND2, CUBN, CWC27, CXCL13, CYP1A1, CYP3A5, DLEU1, DNAH11, DNAH14,
DYSF, EPHX1, EPHX2, FAT4, FRAS1, GRIK2, HIVEP1, HMCN1, IL15, KDM6A, LARS2, LMO1, LRRK2, MERTK, MMP2, NCOA3, NEK11,
NFKB1, OSBPL1A, OTOL1, PARD3, PDE4D, PHACTR1, PKHD1, PLOD2, PPP2R2B, PRPF8, PTPRD, PXDNL, RPL11, SGCZ, SLC22A20,
SLC24A3, SLC6A3, SPAG17, STAG2, STAM, SYK, SYNE2, TEK, THSD7B, TLN2, TMC1, TNFSF11, TRHDE, ULK4, VPS13B, YTHDC2,
ZBTB49, ZFPM2
>102
ADAM23, adenosine triphosphate, AHI1, ALDH3A2, ALDH5A1, ANK3, ASIC2, ATRX, BRAF, CDH2, CNTNAP2, CYP19A1, DAB1, DDIT4,
DISC1, EGR2, EN1, EPHA7, ERBB3, ERBB4, FAT4, FOXP2, IL1RAPL1, IL1RAPL2, IMMP2L, LHX8, LRRK2, PARD3, PPT1, RAPGEF2,
ROBO2, SLC6A3, STAM, TENM2, TENM4, ULK4, VAX1, VWC2
>103
ABCB1, AGBL4, ANO3, BRAF, CASP8, CCDC178, CDH10, CDH13, CDH2, CNBD1, CTNND2, CUBN, CXCL13, DAB1, DCC, DOCK4, EPHA7,
ERBB3, ERBB4, EYS, FAT4, HMCN1, HMGCR, ITGA8, KCTD16, MMP2, MYRIP, NFKB1, PDPN, PDS5B, PLOD2, PXDNL, ROBO2,
SEMA6D, SLC6A3, STXBP5L, SYNE2, TCHH, THSD7B, TRHDE, UTRN
>104
ACSL4, ADAMTS6, AHI1, CAPN3, CASP8, CD22, CD28, CFH, CNTNAP2, COL19A1, CPNE4, CTSB, CXCL13, CYBB, CYP19A1, DAB1,
DDAH1, DLGAP2, DYM, ERBB3, FGF14, FSTL4, GABRA2, GABRB1, GABRB3, GABRG2, GRIK2, GRM8, HCN1, HMGCR, HPGD, HTR3B,
HYAL1, HYOU1, ICOS, IL15, ITGAM, ITGAX, ITPR2, JAZF1, KCNE1, KCTD16, LARS2, MERTK, NFKB1, NRG3, PDE11A, PDE4D,
phosphate, PPARGC1A, PPP2R2B, PTPN22, PXDNL, ROBO2, RTP4, SGCZ, SLCGA3, SOD1, SQSTM1, TEK, TNFSF11, TUSC3, VCAM1
>105
ABCA10, ABCA12, ABCA13, ABCA4, ABCB1, ABCC6, ACADS, ADAMTS6, ADCY8, AGK, AKAP9, ALDH5A1, ANK3, ANKRD30A, ANKS1B,
ANO3, ATRX, BBS9, BOD1, BRAF, CADM2, CASP8, CCDC7, CCSER1, CDH10, CDH13, CDH2, CFH, CHRNA7, CLN3, CNTN5, CNTNAP2,
COL19A1, CPNE4, CTNND2, CTSB, CUBN, CXCL13, DCC, DLGAP2, DNAH11, DNAII14, DNM3, DOCK4, EGR2, EPIIX1, EPIIX2, ERBB3,
ERBB4, EVC, EYS, FAF1, FAT4, FUT8, GABRB3, GALNT2, GPC5, GRID1, GRM5, GRM8, GTDC1, GYS2, HCN1, HMCN1, HMGN5, IL15,
ITGA8, ITGAX, JAZF1, KCNN2, KCTD8, KDM6A, KIF26B, KRT6B, KRTAP9-2, KRTAP9-4, KRTAP9-8, LBR, LMO1, LRRK2, MAST4,
MB21D2, MMP2, MTUS2, NCOA3, NELL1, NUDT13, OCA2, OPHN1, OSBPL1A, OTOL1, PARD3, PDE11A, PDPN, PDZRN4, PKHD1, PLOD2,
PPARGC1A, PPP2R2B, PROS1, PTPRD, PTPRN2, PXDNL, RIIAG, ROBO2, SCG3, SGCZ, SLCO3A1, SOD1, STAG2, STXBP5L, SYK, SYNE2,
TCHH, TEK, TENM2, THOP1, THSD7B, TLN2, TNFSF11, TRHDE, TRIM36, UTRN, VAV3, VCAM1, VPS13B, WDPCP, WDR27, WWTR1,
XKR4, YTHDC2, ZPLD1
>106
ABCB1, ADCY8, AHI1, ALOX5, CCDC7, CD28, CTNNA3, CTSB, CXCL13, CYP19A1, DYM, EPHX2, EVC, FAF1, GABRA2, GABRB,
GABRB3, GABRG2, GALNT2, HMGCR, HTR3B, ICOS, IL15, LRRK2, MMP2, NELL1, NFKB1, OCA2, PDE11A, PPP2R2B, PTPN22, PTPRN2,
RPL11, SIL1, SYK, TNFSF11, TPST1, VCAM1, YTHDC2
>107
ABCA10, ABCA4, ABCB1, ABCC6, ACADS, AGXT, AHI1, ALDH5A1, ANK3, ARHGEF4, BRAF, CCDC137, CCT8, CD22, CNTNAP2, CTNNA3,
CTNND2, CYP19A1, CYP1A1, DISC1, DNAH14, EPHA7, EPHX2, ERBB3, EYS, HTR3B, HYOU1, ITGAM, LRRK2, MASP2, MERTK, MTUS2,
NCOA3, NSUN3, OCA2, OSBPL1A, PHACTR1, PPARGC1A, PTPN12, PTPRN2, ROBO2, SEMA6D, SLC24A3, STXBP5L, TCHH, TEK, TMC1,
TRIMS, VAV3, VPS13B, WDPCP, WDK27, ZEPM2
>108
ABCA12, ABCA4, ABCB1, ABCC6, ACADSB, ACOT7, ACSL4, ACSS2, adenosine triphosphate, AGK, ALDH5A1, ALOX5, CASP8, CASR, CLN3,
CYP1A1, DAB1, DLD, EPHX1, EPHX2, ERBB4, HPGD, HSD17B4, IL15, LIPG, NFKB1, OSBPL1A, PARD3, PCTP, PDPN, PEX5,
PPAKGC1A, PKKAG2, SC5D, SLCO3A1, SOD1, SUCLG2, SYK
>109
ABCA10, ABCA12, ABCA4, ABCB1, ACADS, ACSS2, ADAM23, ADAMTS6, AGK, AKAP9, ANKRD30A, ANKS1B, ANO3, ATRX, BMPR2,
BRAF, C12orf42, CAMKMT, CASP8, CCDC7, CD22, CDH10, CDH2, CFH, CNTLN, CNTNAP2, CTNND2, CUBN, CYP19A1, CYP1A1, CYP3A5,
DD1T4, DNAH11, DNAH14, DNAJC13, DNM3, DYSF, EGR2, EN1, EPHX1, EPHX2, ERBB3, ERBB4, ESRRG, EVC, EAM122C, EAT4,
FRAS1, GRID1, GRIK2, GRM8, GSTM2, HCN1, HIVEP1, HMCN1, HMGCR, HMGN5, IL1RAPL1, ITGAX, KCNH8, KCTD16, KDM6A, KHT6B,
KRTAP9-9, LINGO2, LMO1, LRRK2, MAST4, MB21D2, MCCC1, MMP2, MTUS2, NCOA3, NUDT13, OCA2, OPHN1, OSBPL1A, PDPN,
PDS5B, PHACTR1, PKHD1, PRKAG2, PTPN22, PTPRD, PTPRN2, PXDNL, ROBO2, SIL1, SLC25A12, SLCO3A1, SOD1, STAG2, TCHH, TEK,
TENM2, THSD7B, TLN2, TNFSF11, TRHDE, TRIM36, ULK4, UTRN, VAV3, VCAM1, VPS13B, WDPCP, WWTR1, ZFPM2, ZNF608, ZPLD1
>110
ABCA4, ABCC6, adenosine triphosphate, ADGRV1, AHI1, ANK3, ATRX, BARX1, BNC2, BRAF, CDH2, CFH, CLN3, CNTNAP2, CYP19A1,
DAB1, DDIT4, EGR2, EN1, EPHA7, EPHX2, ERBB4, FAT4, FOXP2, FRAS1, GABRB3, HCN1, IL1RAPL1, IMMP2L, ITGA8, LHX8, LRRK2,
MERTK, MMP2, NPHP1, PARD3, PPT1, RAPGEF2, ROBO2, SLC6A3, SOD1, STAM, TBC1D32, TENM2, ULK4, VAX1, VCAM1, VWC2,
WDPCP
>111
ADCY8, ADGRB3, ANK3, BRAF, CHRNA7, CLN3, CNTNAP2, CRHR1, CTNND2, CYBB, CYP19A1, EN1, GABRB3, GABRG2, GRID2, GRM4,
GRM5, HCN1, HMGCR, ITGA8, LHX8, NFKB1, OPHN1, PDE11A, PDE4D, PPARGC1A, PPT1, PTPRN2, SLC6A3, TUSC3
>112
ABCA4, adenosine triphosphate, ADGRV1, AGBL4, AHI1, ANK3, ASIC2, CASP8, CFH, CLN3, CRHR1, CTSB, CYBB, ESRRG, EYS, GABRB3,
GRID1, GRID2, HGSNAT, HMCN1, HSD17B4, LRRK2, MERTK, MFSD8, NFKB1, NPHP1, PPARGC1A, PPT1, PRPF8, RAB28, SOD1,
SQSTM1
>113
ABCB1, AGBL4, ANO3, BRAF, CCDC178, CDH10, CDH13, CDH2, CNBD1, CTNND2, CUBN, CXCL13, DAB1, DCC, DOCK4, EPHA7, ERBB3,
ERBB4, EYS, FAT4, HMCN1, ITGA8, KCTD16, MMP2, MYRIP, PDPN, PDS5B, PLOD2, PXDNL, ROBO2, SEMA6D, SLC6A3, STXBP5L,
SYNE2, TCHH, THSD7B, TRHDE
>114
ALDH5A1, CDH2, CLN3, CNTNAP2, CTSB, DNAI1, HSD17B4, ITPR2, LRRK2, PPARGC1A, PPT1, SOD1, SQSTM1, STAM
>115
ABCA4, ABCC6, adenosine triphosphate, ADGRV1, AHI1, ANK3, ATRX, BARX1, BMPR2, BNC2, BRAF, CDH2, CFH, CLN3, CNTNAP2,
CYP19A1, DAB1, DDIT4, DNAH11, EGR2, EN1, EPHA7, EPHX2, ERBB4, FAT4, FOXP2, FRAS1, GABRB3, HCN1, IL1RAPL1, IMMP2L,
ITGA8, LHX8, LRRK2, MERTK, MMP2, NPHP1, PARD3, PPT1, RAPGEF2, ROBO2, SLC6A3, SOD1, STAM, TBC1D32, TENM2, ULK4,
VAX1, VCAM1, VWC2, WDPCP
>116
ABCA10, ABCA13, ABCA4, ABCB1, ACADSB, ANK3, ANKRD30A, ARHGAP24, BRAF, CCDC7, CD22, CFH, CNTLN, CNTN5, CTNNA3,
CTNND2, CUBN, CWC27, CYP1A1, CYP3A5, DNAH11, DNAH14, DYSH, EPHX1, EPHX2, FAT4, FRAS1, GRIK2, HIVEP1, HMCN1, IL15,
KDM6A, LMO1, MERTK, MMP2, NCOA3, NEK11, OSBPL1A, OTOL1, PARD3, PHACTR1, PKHD1, PPP2R2B, PRPFS, PTPRD, PXDNL,
RPL11, SGCZ, SLC22A20, SLC24A3, SLC6A3, SPAG17, STAG2, STAM, SYK, SYNE2, TEK, THSD7B, TLN2, TNFSF11, ULK4, VPS13B,
YTHDC2, ZBTB49, ZFPM2
>117
ALDH5A1, ANK3, C4orf22, CHRNA7, CNBD1, GABRA2, GABRB1, GABRB3, GABRG2, GRID1, GRIK2, GRM4, GRM5, HMGCR, MCCC1,
NEK11, NKAIN2, SLC6A3, SYK, TENM4
>118
ADCY8, ALOX5, BMPR2, CASP8, CFH, CHRNA7, CTSB, CYBB, CYP1A1, EGR2, GABRA2, GABRB1, GABRB3, GABRG2, HMGCR, HYOU1,
IL15, LBR, NFKB1, NPR3, PDE4D, PROS1, PTPN20, SLC6A3, SYK, TNESF11, VCAM1
>119
AD CY8, ADGRB3, BRAF, CHRNA7, CLN3, CNTNAP2, CRHR1, CTNND2, CYBB, CYP19A1, EN1, GABRB3, GABRG2, GRID2, GRM4, GRM5,
HCN1, HMGCR, ITGA8, LHX8, NFKB1, OPHN1, PDE11A, PDE4D, PPARGC1A, PPT1, PTPRN2, SLC6A3
>120
ABCA10, ABCA13, ABCA4, ARCB1, ACADSB, AHI1, ANK3, ANKRD30A, ARHGAP24, BRAF, CCDC7, CD22, CD28, CDH10, CFH, CNTLN,
CNTN5, CNTNAP2, CTNNA3, CTNND2, CUBN, CWC27, CXCL13, CYP1A1, CYP3A5, DLEU1, DNAH11, DNAH14, DYSF, EPHX1, EPHX2,
FAT4, FRAS1, GRIK2, HIVEP1, HMCN1, IL15, KDM6A, LMO1, LRRK2, MERTK, MMP2, NCOA3, NEK11, OSBPL1A, OTOL1, PARD3,
PDE4D, PHACTR1, PKHD1, PPP2R2B, PRPF5, PTPRD, PXDNL, RPL11, SGCZ, SLC22A20, SLC24A3, SLC6A3, SPAG17, STAG2, STAM,
SYK, SYNE2, TEK, THSD7B, TLN2, TMC1, TNFSF11, TRHDE, ULK4, VPS13B, YTHDC2, ZBTB49, ZFPM2
>121
ABCA10, ABCA12, ABCA13, ABCA4, ABCB1, ABCC6, ACADS, ADAMTS6, ADCY8, AGK, AKAP9, ALDH5A1, ANK3, ANKRD30A, ANKS1B,
ANO3, ATRX, BBS9, BOD1, BRAF, CADM2, CASP8, CCDC7, CCSER1, CDH10, CDH13, CDH2, CFH, CHRNA7, CLN3, CNTN5, CNTNAP2,
COL19A1, CPNE4, CTNND2, CUBN, CXCL13, DCC, DLGAP2, DNAH11, DNAH14, DNM3, DOCK4, EGR2, EPHX1, EPHX2, ERBB3, ERBB4,
EVC, EYS, FAT4, FUT8, GABRB3, GALNT2, GPC5, GRID1, GRM5, GRM8, GTDC1, GYS2, HCN1, HMCN1, HMGN5, ITGA8, ITGAX, JAZF1,
KCNN2, KCTD8, KDM6A, KIF26B, KRT6B, KRTAP9-2, KRTAP9-4, KRTAP9-8, LBR, LRRK2, MAST4, MB21D2, MTUS2, NCOA3, NELL1,
NUDT13, OCA2, OPHN1, OSBPL1A, OTOL1, PDE11A, PDPN, PDZRN4, PKHD1, PLOD2, PPARGC1A, PPP2R2B, PROS1, PTPRD, PTPRN2,
PXDNL, RHAG, ROBO2, SCG3, SGCZ, SLCO3A1, SOD1, STAG2, STXBP5L, SYK, SYNE2, TCHH, TENM2, THOP1, THSD7B, TLN2, TRHDE,
TRIM36, UTRN, VCAM1, VPS13B, WDPCP, WDR27, WWTR1, XKR4, YTHDC2, ZPLD1
>122
adenosine triphosphate, ADGRB3, ADGRL2, ASIC2, CASR, CDII2, CIIRNA7, CYP19A1, DCC, DISC1, DNM3, DOCK4, EPIIA7, ERBB4, GRID2,
IL1RAPL1, LINGO2, LRRK2, PARD3, RAPSN, UTRN
>123
ADGRB3, ADGRL2, ASIC2, CDH2, CHRNA7, CYP19A1, DCC, DISC1, DNM3, EPHA7, ERBB4, GRID2, IL1RAPL1, LINGO2, LRRK2, PARD3,
RAPSN, UTRN
>124
ABCB1, ADAM23, adenosine triphosphate, ADH1C, ALDH5A1, ANK3, ANO3, CAPN3, CASP8, CDH2, CHRNA7, CLN3, CRYM, CTNNA3,
CTSB, CYP19A1, DAB1, DCC, DNAJC13, EGR2, EPHX2, ERBB3, ESRRG, FGF14, FOXN3, GABRA2, GABRB1, GABRB3, GABRG2, GPR6,
GRID2, GRIK2, IIMGCR, IISD17B4, ITGAM, LRRK2, MERTK, NFKB1, PCTP, PDE4D, phosphate, PLOD2, PPARGC1A, PPP2R2B, PPT1,
PTPRD, SIL1, SLC6A3, SOD1, SQSTM1, WWTR1, XK
>125
adenosine triphosphate, ADGRB3, AHI1, AKAP9, ANK3, ARHGAP24, ARHGEF4, BBS5, BBS9, BRAF, CD2AP, CDH13, CDH2, CNTNAP2,
CRIIR1, CTNND2, CYP19A1, DAB1, DCC, DDAII1, DISC1, DNM3, DOCK4, EPIIA7, EPIIX2, ERBB4, FUT8, GRID2, GRM4, GRM5, ICOS,
IL1RAPL1, ITGA8, ITGAM, LRRK2, MTUS2, NFKB1, OPHN1, PARD3, PDPN, PKHD1, PTPN20, RAPGEF2, RAPSN, RIT2, RNF19A, ROBO2,
SOD1, SYK, TBC1D32, TENM4, TNFSF11, ULK4, VAV3, WDPCP, WWTR1
>126
AGBL4, ANK3, CRIIR1, CTSB, CYBB, GRID2, IISD17B4, LRRK2, NEKB1, PPARGC1A, PPT1, SOD1, SQSTM1
>127
ABCB1, AGBL4, ANO3, BRAF, CCDC178, CDH10, CDH2, CNBD1, CTNND2, DAB1, DOCK4, EPHA7, EYS, FAT4, HMCN1, KCTD16, MYRIP,
PDS5B, PXDNL, SEMA6D, SLC6A3, STXBP5L, SYNE2, THSD7B, TRHDE
>128
adenosine triphosphate, ADGRB3, AHI1, AKAP9, ANK3, ARHGAP24, ARHGEF4, BBS5, BBS9, BRAF, CD2AP, CDH13, CDH2, CLN3,
CNTNAP2, CRHR1, CTNND2, CYP19A1, DAB1, DCC, DDAH1, DISC1, DNAJC13, DNM3, DOCK4, DYM, EPHA7, EPHX2, ERBB4, FUT8,
GRID2, GRM4, GRM5, ICOS, IL1RAPL1, ITGA8, ITGAM, KRT6B, LRRK2, MERTK, MFSD8, MTUS2, NFKB1, OPHN1, PARD3, PDPN, PEX5,
PHACTR1, PKHD1, PPARGC1A, PPT1, PTPN20, RAPGEF2, RAPSN, RIT2, RNF19A, ROBO2, SOD1, SYK, TBC1D32, TENM4, TNFSF11,
ULK4, UVRAG, VAV3, WDPCP, WWTR1
>129
ABCA12, ABCA4, ABCB1, ADGRV1, BRAF, CAPN3, CD22, CD28, CD2AP, CDH2, CFH, CHRNA7, CLN3, CNTNAP2, CTNNA3, CTSB, CYBB,
CYP19A1, DNM3, DYSF, EPHA7, ERBB3, GRID2, HSD17B4, HYAL1, IL15, IQGAP2, ITGA8, ITPR2, KRT6B, LHX8, LRRK2, MERTK,
NFKB1, NPHP1, NPR3, OPHN1, OSCAR, PARD3, PCTP, PDPN, PDS5B, PPARGC1A, PPT1, PTPN22, RAPSN, ROBO2, SC5D, SOD1, SYK,
SYNE2, TDRKH, TEK, TNFSF11, UTRN, VAV3, XK
>130
ADGRB3, ADGRL2, ASIC2, CASR, CDH2, CHRNA7, CYP19A1, DCC, DISC1, DNM3, EPHA7, ERBB4, GRID2, IL1RAPL1, LINGO2, LRRK2,
PARD3, RAPSN, TLN2, UTRN
>131
AHI1, ANK3, ASIC2, CHRNA7, CLN3, CNTNAP2, CTSB, DAB1, DCC, EN1, EPHA7, ERBB3, ERBB4, GABRB3, GRID1, GRID2, IL1RAPL1,
MERTK, OPHN1, PEX5, PPARGC1A, PPT1, PROS1, ROBO2, SLC6A3, TENM2, ULK4, VAX1
>132
ABCB1, AGBL4, ANO3, BRAF, CCDC178, CDH10, CDH2, CNBD1, CTNND2, CUBN, DAB1, DCC, DOCK4, EPHA7, EYS, FAT4, HMCN1,
KCTD16, MYRIP, PDS5B, PXDNL, SEMA6D, SLC6A3, STXBP5L, SYNE2, TCHH, THSD7B, TRHDE
>133
ABCB1, ALDH5A1, ANK3, C4orf22, CHRNA7, CNBD1, GABRA2, GABRB1, GABRB3, GABRG2, GRID1, GRIK2, GRM4, GRM5, HMGCR,
HTR3B, MCCC1, NEK11, NKAIN2, PDE11A, SLC6A3, SYK, TENM4, VPS13B
>134
ABCB1, ADCY8, AHI1, ALOX5, CASP8, CCDC7, CD28, CTNNA3, CTSB, CXCL13, CYP19A1, DYM, EPHX2, ERBB3, EVC, FAF1, GABRA2,
GABRB1, GABRB3, GABRG2, GALNT2, HMGCR, HPGD, HTR3B, HYAL1, ICOS, IL15, ITGAM, LRRK2, MERTK, MMP2, NELL1, NFKB1,
OCA2, PDE11A, PDE4D, PPP2R2B, PTPN22, PTPRN2, RPL11,
SIL1, SLC6A3, SYK, TNFSF11, TPST1, VCAM1, YTHDC2
>135
AHI1, ANK3, ASIC2, CHRNA7, CLN3, CNTNAP2, CTSB, DAB1, DCC, EN1, EPHA7, ERBB3, ERBB4, GABRB3, GRID2, IL1RAPL1, MERTK,
OPHN1, PEX5, PPARGC1A, PPT1, PROS1, ROBO2, SLC6A3, TENM2, ULK4, VAX1
>136
ADGRB3, ADGRL2, ASIC2, CASR, CDH2, CHRNA7, CYP19A1, DCC, DISC1, DNM3, DOCK4, EPHA7, ERBB4, GRID2, IL1RAPL1, LINGO2,
LRRK2, PARD3, RAPSN, UTRN
>137
ABCA10, ABCA12, ABCA4, ABCB1, ACADS, ACSS2, AGK, ANKRD30A, ANO3, ATRX, BRAF, CASP8, CCDC7, CDH10, CDH2, CFH,
CNTNAP2, CTNND2, CUBN, CYP19A1, DNAH11, DNAH14, DNM3, EGR2, EPHX1, ERBB3, EVC, FAM122C, FAT4, GRID1, HIVEP1,
HMCN1, HMGN5, ITGAX, KDM6A, KRT6B, LRRK2, MCCC1, MMP2, MTUS2, NCOA3, OCA2, OPHN1, OSBPL1A, PDE4D, PDS5B, PKHD1,
PTPRN2, PXDNL, ROBO2, SLC25A12, SLCO3A1, STAG2, TENM2, THSD7B, TLN2, TRHDE, TRIM36, TUSC3, ULK4, UTRN, VAV3, VCAM1,
WDPCP, ZFPM2, ZPLD1
>138
ABCA10, ABCA12, ABCA13, ABCA4, ABCB1, ACADSB, AHI1, ALOX5, ANK3, ANKRD30A, ARHGAP24, BMPR2, BRAF, CASP8, CCDC7,
CD22, CD28, CDH10, CFH, CNTLN, CNTN5, CNTNAP2, CTNNA3, CTNND2, CUBN, CWC27, CXCL13, CYP1A1, CYP3A5, DCC, DLEU1,
DNAH11, DNAH14, DNM3, DYSF, EGR2, EPHX1, EPHX2, FAT4, FRAS1, GRIK2, HIVEP1, HMCN1, HMGCR, IL15, KDM6A, LARS2, LMO1,
LRRK2, MERTK, MMP2, NCOA3, NEK11, NFKB1, OSBPL1A, OTOL1, PARD3, PDE4D, PHACTR1, PKHD1, PLOD2, PPP2R2B, PRPF8,
PTPRD, PXDNL, RPL11, SGCZ, SLC22A20, SLC24A3, SLC6A3, SPAG17, STAG2, STAM, SYK, SYNE2, TEK, THOP1, THSD7B, TLN2, TMC1,
TNFSF11, TRHDE, ULK4, VPS13B, YTHDC2, ZBTB49, ZFPM2
>139
ABCA10, ABCA12, ABCA4, ACADS, AGK, ANKRD30A, ANO3, ATRX, BRAE, CASP8, CCDC7, CDH10, CDH2, CFH, CNTNAP2, CTNND2,
CUBN, CYP19A1, DNAH11, DNAH14, DNM3, EGR2, EPHX1, EVC, FAM122C, FAT4, GRID1, HIVEP1, HMCN1, HMGN5, ITGAX, KDM6A,
KRT6B, LRRK2, MCCC1, MMP2, MTUS2, NCOA3, OCA2, OPHN1, OSBPL1A, PKHD1, PTPRN2, PXDNL, ROBO2, SLC25A12, SLCO3A1,
STAG2, TENM2, THSD7B, TLN2, TRHDE, TRIM36, ULK4, UTRN, VAV3, WDPCP, ZFPM2, ZPLD1
>140
ABCA10, ABCA12, ABCA13, ABCA4, ABCB1, ACADSB, adenosine triphosphate, AHI1, ALOX5, ANK3, ANKRD30A, ARHGAP24, ATRX,
BMPR2, BRAF, CASP8, CCDC7, CD22, CD28, CDH10, CFH, CNTLN, CNTN5, CNTNAP2, CTNNA3, CTNND2, CUBN, CWC27, CXCL13,
CYP1A1, CYP3A5, DCC, DLEU1, DNAH11, DNAH14, DNM3, DYSF, EGR2, EPHX1, EPHX2, FAT4, FRAS1, GRIK2, HIVEP1, HMCN1,
HMGCR, IL15, KDM6A, LARS2, LMO1, LRRK2, MERTK, MMP2, NCOA3, NEK11, NFKB1, NRG3, OSBPL1A, OTOL1, PARD3, PDE4D,
PHACTR1, PKHD1, PLOD2, PPP2R2B, PRPF8, PTPRD, PXDNL, RPL11, SGCZ, SLC22A20, SLC24A3, SLC6A3, SPAG17, STAG2, STAM,
SYK, SYNE2, TEK, THOP1, THSD7B, TLN2, TMC1, TNFSF11, TNNI3K, TRHDE, ULK4, VPS13B, YTHDC2, ZBTB49, ZFPM2
>141
adenosine triphosphate, ADGRB3, AHI1, AKAP9, ANK3, ARHGAP24, ARHGEF4, BBS5, BBS9, BRAF, CD2AP, CDH13, CDH2, CLN3,
CNTNAP2, CRHR1, CTNND2, CYP19A1, DAB1, DCC, DDAH1, DISCI, DNM3, DOCK4, EPHA7, EPHX2, ERBB4, FUT8, GRID2, GRM4,
GRM5, ICOS, IL1RAPL1, ITGA8, ITGAM, KRT6B, LRRK2, MERTK, MTUS2, NFKB1, OPHN1, PARD3, PDPN, PHACTR1, PKHD1, PTPN20,
RAPGEF2, RAPSN, RIT2, RNF19A, ROBO2, SOD1, SYK, TBC1D32, TENM4, TNFSF11, ULK4, UVRAG, VAV3, WDPCP, WWTR1
>142
ABCA10, ABCA12, ABCA4, ABCB1, ACADS, ACSS2, AGK, ANKRD30A, ANO3, ATRX, BRAF, CASP8, CCDC7, CDH10, CDH2, CFH,
CNTNAP2, CTNND2, CUBN, CYP19A1, DNAH11, DNAH14, DNM3, EGR2, EPHX1, ERBB3, EVC, FAM122C, FAT4, GRID1, HIVEP1,
HMCN1, HMGN5, ITGAX, KDM6A, KRT6B, LRRK2, MCCC1, MMP2, MTUS2, NCOA3, OCA2, OPHN1, OSBPL1A, PDE4D, PDPN, PDS5B,
PKHD1, PTPRN2, PXDNL, ROBO2, SLC25A12, SLCO3A1, STAG2, TENM2, THSD7B, TLN2, TRHDE, TRIM36, TUSC3, ULK4, UTRN, VAV3,
VCAM1, WDPCP, ZFPM2, ZPLD1
>143
adenosine triphosphate, AHI1, ANK3, ATRX, BRAF, CDH2, CNTNAP2, CYP19A1, DAB1, DDIT4, EGR2, EN1, EPHA7, ERBB4, FAT4, FOXP2,
IL1RAPL1, IMMP2L, LHX8, LRRK2, PARD3, PPT1, RAPGEF2, ROBO2, SLC6A3, STAM, ULK4, VAX1, VWC2
>144
ABCA12, ADAMTSG, BARX1, BMPR2, BRAF, CAPN3, CASP8, CRIIR1, CYP19A1, DMRTA1, DNAII11, DNAI1, EGR2, EN1, ERBB3, ERBB4,
ESRRG, FAT4, FRAS1, FUT8, GRID2, HYAL1, IL15, IMMP2L, ITGA8, KDM6A, LALBA, LHX8, LRRK2, MMP2, NCOA3, NFKB1, NRG3,
PARD3, PDPN, PDS5B, PKHD1, PPARGC1A, PTPN12, PTPRN2, RAPGEF2, ROBO2, SLC6A3, SOD1, SYK, TBC1D32, TEK, TNFSF11,
TSC22D1, UTRN, VCAM1, WDPCP, WWTR1, ZFPM2
>145
ABCB1, AGBL4, ANO3, BRAF, CCDC178, CDH10, CDH2, CNBD1, CTNND2, CUBN, DAB1, DCC, DOCK4, EPHA7, EYS, FAT4, HMCN1,
HMGCR, KCTD16, MYRIP, PDS5B, PXDNL, SEMA6D, SLC6A3, STXBP5L, SYNE2, TCHH, THSD7B, TRHDE
>146
ABCA12, ABCA4, ABCB1, ABCC0, ACADS, ACSL4, adenosine triphosphate, ADGRL2, AGK, AGXT, AIII1, AKAP9, ALOX5, ANK3, ASIC2,
BRAF, CASR, CD22, CD28, CES3, CFH, CHRNA7, CLN3, CRHR1, CRYM, CUBN, EGR2, EPHX1, ERBB3, ERBB4, FGF14, FRAS1, GABRA2,
GABRB1, GABRB3, GABRG2, GIF, GLRA2, GOSR1,
GRID2, GRIK2, GRM4, GRM8, HTR3B, ICOS, ITPR2, LIPG, NPR3, OSBPL1A, P3H1, PCTP, PEX5, phosphate, PLCL1, PPARGC1A, PPT1,
PRKAG2, PTPRN2, RIIAG, SLC24A3, SLC25A12, SLC6A3, SLCO3A1, SOD1, SQSTM1, STXBP5L, SYK, TEK, TUSC3, XK
>147
AGBL4, ANK3, CRHR1, CTSB, CYBB, GRID2, HSD17B4, LRRK2, NFKB1, PPARGC1A, PPT1, SOD1
>148
ABCB1, ADCY8, AIII1, ALOX5, CASP8, CCDC7, CD28, CTNNA3, CTSB, CXCL13, CYP19A1, DYM, EPIIX2, EVC, FAF1, GABRA2, GABRB1,
GABRB3, GABRG2, GALNT2, HMGCR, HTR3B, HYAL1, ICOS, IL15, ITGAM, LRRK2, MERTK, MMP2, NELL1, NFKB1, OCA2, PDE11A,
PDE4D, PPP2R2B, PTPN22, PTPRN2, RPL11, SIL1, SLC6A3, SYK, TNFSF11, TPST1, VCAM1, YTHDC2
>149
CDH2, CTSB, ITPR2, SOD1
>150
ABCB1, ALDH5A1, ALOX5, CHRNA7, CYP19A1, EPHX2, GABRA2, GABRB1, GABRB3, GABRG2, GRM4, GRM5, HMGCR, HTR3B, HYAL1,
KCNE1, PDE11A, PDE4D, SLC6A3, TEK, TNFSF11
>151
ABCA10, ABCA12, ABCA4, ABCB1, ACADS, AGK, ANKRD30A, ANO3, ATRX, BRAF, CASP8, CCDC7, CDH10, CDH2, CFH, CNTNAP2,
CTNND2, CUBN, CYP19A1, DNAH11, DNAH14, DNM3, EGR2, EPHX1, ERBB3, EVC, FAM122C, FAT4, GRID1, HIVEP1, HMCN1, HMGN5,
ITGAX, KDM6A, KRT6B, LRRK2, MCCC1, MMP2, MTUS2, NCOA3, OCA2, OPHN1, OSBPLIA, PDS5B, PKHD1, PTPRN2, PXDNL, ROBO2,
SLC25A12, SLCO3A1, STAG2, TENM2, THSD7B, TLN2, TRHDE, TRIM36, ULK4, UTRN, VAV3, VCAM1, WDPCP, ZFPM2, ZPLD1
>152
ABCA12, ABCA13, ABCA4, ABCB1, ACADSB, AHI1, ANK3, ANKRD30A, ARHGAP24, ATRX, BMPR2, BRAF, CCDC7, CFH, CNTLN, CNTN5,
CTNNA3, CTNND2, CUBN, CWC27, CYP1A1, DNAH11, DNAH14, DYSF, EPHX1, EPHX2, FAT4, FRAS1, GRIK2, HIVEP1, IL15, KDM6A,
LARS2, MERTK, MMP2, NEK11, NFKB1, OSBPL1A, OTOL1, PDE4D, PHACTR1, PKHD1, PLOD2, PPP2R2B, PRPF8, PXDNL, RPL11, SGCZ,
SLC22A20, SLC24A3, SPAG17, STAG2, STAM, SYNE2, TEK, THSD7B, TLN2, TNFSF11, ULK4, VPS13B, YTHDC2, ZBTB49, ZFPM2
>153
ABCB1, adenosine triphosphate, ALDH5A1, CHRNA7, CRHR1, CYP19A1, CYP1A1, GABRA2, GABRB1, GABRB3, GABRG2, GRM5, HMGCR,
HTR3B, ITPR2, PDE11A, phosphate, SLC6A3, VPS13B
>154
AGXT, CASR, CD28, CYP1A1, GABRA2, GABRB1, GABRB3, GABRG2, HMGCR, ITGAM, KCNE1, MMP2, NPR3, PDE11A, PDE4D,
phosphate, PVT1, SLC6A3
>155
ALOX5, BRAF, CHRNA7, GABRA2, GABRB1, GABRB3, GABRG2, HMGCR, PDE4D, PROS1, SYK, TEK, ULK4
>156
ABCA10, ABCA13, ABCA4, ABCB1, ACADSB, AHI1, ALOX5, ANK3, ANKRD30A, ARHGAP24, BRAF, CASP8, CCDC7, CD22, CD28, CDH10,
CFH, CNTLN, CNTN5, CNTNAP2, CTNNA3, CTNND2, CUBN, CWC27, CXCL13, CYP1A1, CYP3A5, DCC, DLEU1, DNAH11, DNAH14,
DNM3, DYSF, EGR2, EPHX1, EPHX2, FAT4, FRAS1, GRIK2, HIVEP1, HMCN1, HMGCR, IL15, KDM6A, LMO1, LRRK2, MERTK, MMP2,
NCOA3, NEK11, NFKB1, OSBPL1A, OTOL1, PARD3, PDE4D, PHACTR1, PKHD1, PPP2R2B, PRPF8, PTPRD, PXDNL, RPL11, SGCZ,
SLC22A20, SLC24A3, SLC6A3, SPAG17, STAG2, STAM, SYK, SYNE2, TEK, THOP1, THSD7B, TLN2, TMC1, TNFSF11, TRHDE, ULK4,
VPS13B, YTHDC2, ZBTB49, ZFPM2
>157
ABCB1, ACOT7, ALDH5A1, ANK3, CHRNA7, CNTNAP2, CRYM, CTSB, CYP3A5, DAB1, DISC1, ERBB3, ERBB4, GABRA2, GABRB1,
GABRB3, GABRG2, GIF, GRID1, GRM4, GRM5, HMGCR, NELL1, PRKAG2, RIT2, SLC6A3, THOP1
>158
ABCB1, ADGRB3, BRAF, CADM2, CDH2, CUBN, EPHA7, ERBB3, FANCI, IQGAP2, KDM6A, LMO1, MTUS2, NFKB1, PKHD1, PRPF8,
PTPN12, PTPRD, ROBO2, SYK, TEK, VCAM1
>159
adenosine triphosphate, ANK3, CNTN5, CNTNAP2, CYBB, DCC, DNM3, EGR2, EN1, EPHA7, ERBB3, ERBB4, GABRG2, GRID1, IL1RAPL1,
LHX8, OPHN1, PTPRN2, RAPSN, SLC6A3, SOD1, SQSTM1, STAM, UTRN, VAX1
>160
ALDH3A2, ALG8, ASIC2, BMPR2, CASP8, CDH13, CFH, CHRNA7, CNTNAP2, CRHR1, CXCL13, CYBB, CYP19A1, CYP3A5, EPHX1, FAT4,
GABRB3, GRM5, HMGCR, KCNE1, NPR3, PDE11A, PDE4D, phosphate, PRELID2, PRKAG2, PTPRD, SLC6A3, SMOC2, SOD1, ULK4, VAV3,
VCAM1, WDR27
>161
AHI1, ALDH3A2, ATRX, BARX1, BBS5, BBS9, BRAF, DYM, ERBB3, EVC, FAT4, GABRB3, HSD17B4, LARS2, LBR, LHX8, LMBR1, NPHP1,
PDE4D, PDS5B, PEX5, RAPSN, SC5D, SIL1, SLC6A3, VAX1, VPS13B, WDPCP, XYLT1
>162
ABCA12, ABCB1, ACSL4, ALOX5, BARX1, BMPR2, CASP8, CD28, CD2AP, CDH2, CFH, CLN3, CRHR1, CTNNA3, CYBB, CYP19A1,
CYP1A1, DNAH11, ERBB3, ESRRG, FAT4, FUT8, HYAL1, ICOS, IL15, IQGAP2, ITGA8, KRT6B, LRRK2, MERTK, MMP2, NFKB1, PARD3,
PCTP, PDPN, PDS5B, PEX5, PKHD1, PPARGC1A, PPT1, PTPN22, ROBO2, SC5D, SOD1, SYK, TEK, TNFSF11, VAV3, VCAM1, WDPCP,
ZFPM2
>163
CASR, CD2AP, CDH10, CDH13, CDH2, CTNNA3, FAT4, GRID2, ICOS, IL1RAPL1, ITGAM, PDPN, SYK, TEK, TENM2, VCAM1
>164
ABCB1, ALDH5A1, ALOX5, ASIC2, CDH13, CNTN5, CTNNA3, CYP19A1, DOCK4, EPHX2, GABRA2, GABRB1, GABRB3, GABRG2, HMGCR,
ITGA8, ITGAM, ITGAX, LIPG, MMP2, NFKB1, NPR3, PDE11A, PDE4D, SLC6A3, SOD1, VAV3, VCAM1
>165
ABCA12, ABCA13, ABCA4, ABCB1, ACADSB, AHI1, ANK3, ANKRD30A, ARHGAP24, BMPR2, BRAF, CCDC7, CFH, CNTLN, CNTN5,
CTNNA3, CTNND2, CUBN, CWC27, CYP1A1, DNAH11, DNAH14, DYSF, EPHX1, EPHX2, FAT4, FRAS1, GRIK2, HIVEP1, IL15, KDM6A,
LARS2, MERTK, MMP2, NEK11, NFKB1, OSBPL1A, OTOL1, PDE4D, PHACTR1, PKHD1, PLOD2, PPP2R2B, PRPF8, PXDNL, RPL11, SGCZ,
SLC22A20, SLC24A3, SPAG17, STAG2, STAM, SYNE2, TEK, THSD7B, TLN2, TNFSF11, ULK4, VPS13B, YTHDC2, ZBTB49, ZFPM2
>166
ABCB1, ATRX, BRAF, CLN3, CNTN5, CNTNAP2, ERBB3, ERBB4, FUT8, GABRB3, GPC5, GRM5, GRM8, HCN1, ITGAX, KDM6A, KRT6B,
LRRK2, MB21D2, RHAG, STAG2
>167
ABCB1, AKAP9 ALDH5A1, ASIC2, CDH13, CHRNA7, CNTN5, CTNNA3, DOCK4, GABRA2, GABRB1, GABRB3, GABRG2, HMGCR, ITGA8,
ITGAM, KCNE1, NPR3, PDE11A, PDE4D, SLC6A3, SOD1
>168
ABCA12, BMPR2, CASP8, CD28, CD2AP, CDH2, CRHR1, CTNNA3, CYBB, CYP1A1, DNAH11, ERBB3, FAT4, FUT8, HYAL1, IL15, ITGA8,
LRRK2, MMP2, NFKB1, PARD3, PDPN, PDS5B, PPARGC1A, PTPN22, SYK, TEK, VAV3, VCAM1, ZFPM2
>169
ABCB1, BRAF, CADM2, CDH2, CUBN, EPHA7, ERBB3, FANCI, KDM6A, LMO1, MTUS2, NFKB1, PKHD1, PRPF8, PTPN12, PTPRD,
ROBO2, SYK, TEK
>170
AGXT, CASR, CD28, CYP1A1, GABRA2, GABRB1, GABRB3, GABRG2, HMGCR, ITGAM, MMP2, NPR3, PDE11A, PDE4D, phosphate, PVT1,
SLC6A3
>171
BRAF, FAT4, HMGCR, PARD3, PKHD1, ROBO2, WDPCP, WWTR1
>172
ABCA12, ABCB1, ACSL4, ALOX5, BARX1, BMPR2, CASP8, CD28, CD2AP, CDH2, CFH, CLN3, CRHR1, CTNNA3, CYBB, CYP19A1,
CYP1A1, DNAII11, ERBB3, ERBB4, ESRRG, FAT4, FUT8, IIYAL1, ICOS, IL15, IQGAP2, ITGA8, KRT6B, LRRK2, MERTK, MMP2, NFKB1,
PARD3, PCTP, PDPN, PDS5B, PEX5, PKHD1, PPARGC1A, PPT1, PTPN22, ROBO2, SC5D, SOD1, SYK, TEK, TNFSF11, VAV3, VCAM1,
WDPCP, ZFPM2
>173
ABCA10, ABCA12, ABCA4, ACADS, AGK, ANKRD30A, ANO3, ATRX, BRAF, CCDC7, CDII10, CDII2, CFII, CNTNAP2, CTNND2, CUBN,
DNAH11, DNAH14, DNM3, EGR2, EPHX1, EVC, FAT4, GRID1, HIVEP1, HMCN1, HMGN5, ITGAX, KDM6A, KRT6B, LRRK2, MCCC1,
MTUS2, NCOA3, OPHN1, OSBPL1A, PKHD1, PTPRN2, PXDNL, ROBO2, SLC25A12, SLCO3A1, STAG2, TENM2, THSD7B, TLN2, TRHDE,
TRIM36, UTRN, VAV3, WDPCP, ZFPM2, ZPLD1
>174
CAPN3, DYSF, EPHA7, GRID2, LRRK2, OPHN1, PARD3, PCTP, PDS5B, RAPSN, ROBO2, SOD1, SYNE2, UTRN, XK
>175
ABCA4, ACSS2, ADAM23, ADAMTS6, AGK, AKAP9, ANKRD30A, ANKS1B, ATRX, BMPR2, BRAF, C12orf42, CAMKMT, CCDC7, CD22,
CDII10, CDII2, CFII, CNTLN, CYP19A1, DNAJC13, DYSF, EN1, EPIIX1, ERBB3, ERBB4, ESRRG, FRAS1, GRIK2, GRM8, IIMGN5,
IL1RAPL1, ITGAX, KCNH8, KCTD16, KDM6A, KRTAP9-9, LINGO2, LRRK2, MAST4, MB21D2, MMP2, NCOA3, NUDT13, PDS5B, PHACTR1,
PRKAG2, PTPN22, PTPRD, ROBO2, SOD1, STAG2, TCHH, VPS13B, WWTR1, ZNF608
>176
GABRA2, GABRB1, GABRB3, GABRG2, HMGCR
>177
ABCB1, ADCY8, AHI1, ALOX5, CASP8, CCDC7, CD22, CD28, CTNNA3, CTSB, CXCL13, CYP19A1, DYM, EGR2, EPHX2, EVC, FAF1,
GABRA2, GABRB1, GABRB3, GABRG2, GALNT2, HMGCR, HTR3B, HYAL1, ICOS, IL15, ITGAM, LBR, LRRK2, MERTK, MMP2, NELL1,
NFKB1, OCA2, PDE11A, PDE4D, PPP2R2B, PTPN22, PTPRN2, RPL11, SIL1, SLC6A3, SYK, TNFSF11, TPST1, VCAM1, YTHDC2
>178
ABCB1, BRAF, CADM2, CDH2, CFH, CUBN, EPHA7, ERBB3, FANCI, KDM6A, LMO1, MTUS2, NFKB1, PKHD1, PRPF8, PTPN12, PTPRD,
HOBO2, SYK, TEK
>179
GABRA2, GABRB1, GABRB3, GABRG2, HMGCR, MMP2, VCAM1
>180
ABCA12, ACADS, ANKRD30A, BMPR2, BRAF, CASP8, CCDC105, CDH2, CFH, CPNE8, CYP19A1, CYP3A5, DCC, DDIT4, DISC1, DNAH11,
ERBB3, ESRRG, FAM184A, FOXP2, FRAS1, FUT8, GABRB1, GABRB3, HIVEP1, HMCN1, HSD17B4, ITGAM, KCTD8, KLHL3, MMP2,
NCOA3, NFKB1, PDE11A, PDS5B, PKHD1, PTPN12, PTPRD, PTPRN2, RPL11, SH3RF3, TCHH, TEK, TENM2, THSD7B, TNFSF11, TRHDE,
ULK4, UTRN, VAV3, VCAM1
>181
ERBB3, GABRA2, GABRB1, GABRB3, GABRG2, HMGCR, MMP2, PDS5B, VCAM1, ZFPM2
>182
ABCA10, BRAF, CD22, CD28, CDH10, CNTNAP2, CTNND2, CXCL13, CYP1A1, CYP3A5, DLEU1, FAT4, HIVEP1, HMCN1, IL15, KDM6A,
LMO1, LRRK2, NCOA3, PARD3, PDE4D, PTPRD, SLC6A3, SYK, SYNE2, TEK, TMC1, TNFSF11, TRHDE
>183
adenosine triphosphate, ANK3, ANKS1B, ASIC2, CASR, CDH2, CHRNA7, CLN3, CNTNAP2, CRHR1, FGF14, GABRG2, GRID2, GRIK2,
GRM4, GRM5, GRM8, HCN1, HTR3B, KCNE1, NFKB1, OPHN1, RAPSN, RIT2
>184
ABCA10, ABCA13, ABCA4, ABCB1, ACADSB, AHI1, ALOX5, ANK3, ANKRD30A, ARHGAP24, BRAF, CASP8, CCDC7, CD22, CD28, CDH10,
CFH, CNTLN, CNTN5, CNTNAP2, CTNNA3, CTNND2, CUBN, CWC27, CXCL13, CYP1A1, CYP3A5, DCC, DLEU1, DNAH11, DNAH14,
DNM3, DYSF, EGR2, EPHX1, EPHX2, FAT4, FRAS1, GRIK2, HIVEP1, HMCN1, HMGCR, IL15, KDM6A, LMO1, LRRK2, MERTK, MMP2,
NCOA3, NEK11, NFKB1, NRG3, OSBPL1A, OTOL1, PARD3, PDE4D, PHACTR1, PKHD1, PPP2R2B, PRPF8, PTPRD, PXDNL, RPL11, SGCZ,
SLC22A20, SLC24A3, SLC6A3, SPAG17, STAG2, STAM, SYK, SYNE2, TEK, THOP1, THSD7B, TLN2, TMC1, TNFSF11, TNNI3K, TRHDE,
ULK4, VPS13B, YTHDC2, ZBTB49, ZFPM2
>185
ABCA4, ABCB1, adenosine triphosphate, ALOX5, ANK3, ATRX, BMPR2, BRAF, CASP8, CD22, CD28, CDH13, CFH, CHRNA7, CLN3, CNTN5,
CNTNAP2, CTSB, CXCL13, CYBB, CYP19A1, CYP1A1, DCC, DNM3, EGR2, EN1, EPHA7, ERBB3, ERBB4, ESRRG, GABRG2, GRID1,
ICOS, IL15, IL1RAPL1, IQGAP2, ITGAM, LHX8, LIPG, LRRK2, MERTK, MMP2, NFKB1, NPHP1, NPR3, OPHN1, OSCAR, PDS5B, PLCL1,
PPARGC1A, PROS1, PTPN12, PTPN22, PTPRN2, RAPGEF2, RAPSN, SLC6A3, SOD1, SPRED2, SQSTM1, STAM, SYK, TEK, TNFSF11,
UTRN, UVRAG, VAV3, VAX1, VCAM1
>186
CDH2, CNTNAP2, CTSB, DNAI1, HSD17B4, ITPR2, PPT1, SOD1, SQSTM1
>187
ABCA12, ABCA4, ABCB1, adenosine triphosphate, ADGRV1, AHI1, ARHGAP24, ARHGEF4, BRAF, CAPN3, CASP8, CD22, CD28, CD2AP,
CDH13, CDH2, CFH, CHRNA7, CLN3, CNTNAP2, CTNNA3, CTNND2, CTSB, CYBB, CYP19A1, DCC, DNM3, DYSF, EPHA7, ERBB3,
ERBB4, GRID1, GRID2, GRM5, HSD17B4, HYAL1, IL15, IQGAP2, ITGA8, ITGAM, ITPR2, KRT6B, LHX8, LRRK2, MERTK, NCOA3, NFKB1,
NPHP1, NPR3, OPHN1, OSCAR, PARD3, PCTP, PDPN, PDS5B, PPARGC1A, PPT1, PTPN12, PTPN22, RAPGEF2, RAPSN, ROBO2, SC5D,
SOD1, SYK, SYNE2, TDRKH, TEK, TNFSF11, UTRN, VAV3, VCAM1, WWTR1, XK
>188
ABCA12, ACADS, ANKRD30A, BMPR2, BRAF, CASP8, CCDC105, CDH2, CFH, CPNE8, CYP19A1, CYP3A5, DCC, DDIT4, DISCI, DNAH11,
ERBB3, ESRRG, FAM184A, FOXP2, FRAS1, FUT8, GABRB1, GABRB3, HIVEP1, HMCN1, HSD17B4, ITGAM, KCTD8, KLHL3, MMP2,
NCOA3, NFKB1, PDE11A, PDPN, PDS5B, PKHD1, PTPN12, PTPRD, PTPRN2, RPL11, SH3RF3, TCHH, TEK, TENM2, THSD7B, TNFSF11,
TRHDE, ULK4, UTRN, VAV3, VCAM1
>189
ABCA12, ACADS, ANKRD30A, BMPR2, BRAF, CASP8, CCDC105, CDH2, CFH, CPNE8, CYP3A5, DCC, DDIT4, DISC1, DNAH11, ERBB3,
ESRRG, FAM184A, FOXP2, FRAS1, FUT8, GABRB1, GABRB3, HIVEP1, HMCN1, HSD17B4, ITGAM, KCTD8, KLHL3, MMP2, NCOA3,
NFKB1, PDE11A, PDS5B, PKHD1, PTPN12, PTPRD, PTPRN2, RPL11, SH3RF3, TCHH, TEK, TENM2, THSD7B, TNFSF11, TRHDE, ULK4,
UTRN, VAV3, VCAM1
>190
ADGRB3, ANK3, ARHGAP24, BRAF, CDH2, CNTNAP2, CRHR1, CTNND2, CYP19A1, DAB1, DCC, DDAH1, EPHA7, ERBB4, FUT8, GRID2,
GRM4, GRM5, IL1RAPL1, LRRK2, NFKB1, OPHN1, PARD3, PDPN, PTPN20, RAPGEF2, RAPSN, RIT2, ROBO2, SOD1, TENM4
>191
GABRA2, GABRB1, GABRB3, GABRG2, HMGCR
>192
GABRA2, GABRB1, GABRB3, GABRG2, HMGCR
>193
ABCA10, ABCA12, ABCA4, ACADS, AGK, ANKRD30A, ANO3, BRAF, CCDC7, CDH10, CDH2, CFH, CNTNAP2, CTNND2, CUBN, DNAH11,
DNAH14, DNM3, EGR2, EPHX1, EVC, FAT4, GRID1, HMCN1, HMGN5, ITGAX, MTUS2, NCOA3, OPHN1, OSBPL1A, PKHD1, PTPRN2,
PXDNL, ROBO2, SLCO3A1, STAG2, TENM2, TLN2, TRHDE, TRIM36, UTRN, WDPCP
>194
ABCA13, ADAM23, ADH1C, ANKRD30A, ANKS1B, ATRX, BRAF, C12orf42, CDH10, CDH12, CPXCR1, CTNND2, CUBN, DCC, DYSF,
ERBB3, ERBB4, FRAS1, FUT8, GMPR, GRID2, HSD17B4, KCNH8, KCTD16, KDM6A, KRT6B, LRRK2, MASP2, MB21D2, NCOA3,
PHACTR1, ROBO2, STAG2, SYNE2, TCHH, TRHDE, ULK4
>195
ABCA12, ACADS, ANKRD30A, BMPR2, BRAF, CASP8, CCDC105, CDH2, CFH, CPNE8, CYP3A5, DCC, DDIT4, DISC1, DNAH11, ERBB3,
ESRRG, FAM184A, FOXP2, FRAS1, FUT8, GABRB1, GABRB3, HIVEP1, HMCN1, HSD17B4, KCTD8, KLHL3, MMP2, NCOA3, NFKB1,
PDE11A, PDS5B, PKHD1, PTPN12, PTPRD, PTPRN2, RPL11, SH3RF3, TCHH, TEK, TENM2, THSD7B, TNFSF11, TRHDE ULK4, UTRN,
VAV3, VCAM1
>196
ALDII5A1, BRAF, CDII2, CLN3, CNTNAP2, CTSB, DNAI1, ERBB3, IISD17B4, IL15, ITPR2, LRRK2, NFKB1, PDE4D, PPARGC1A, PPT1,
SOD1, SQSTM1, STAM, SYK
>197
ABCB1, ALDH5A1, ALOX5, ASIC2, CDH13, CNTN5, CTNNA3, CYP19A1, DOCK4, EPHX2, GABRA2, GABRB1, GABRB3, GABRG2, HMGCR,
ITGA8, ITGAM, ITGAX, LIPG, MMP2, NFKB1, NPR3, PDE11A, PDE4D, SOD1, VCAM1
>198
CASR, CYP1A1, GABRA2, GABRB1, GABRB3, GABRG2, HMGCR, MMP2, PDE11A, PDE4D, phosphate, PVT1, SLC6A3
>199
ABCB1, ADGRV1, ALDII5A1, ANK3, CASR, CIIRNA7, CLN3, CNTNAP2, CRYM, CTSB, EGR2, EPIIX1, GABRA2, GABRB1, GABRB3,
GABRG2, GRIK2, GRM5, HCN1, HTR3B, HYOU1, PLCL1, PPT1, PTPRN2, SLC6A3, STAM
>200
ABCB1, BRAF, CADM2, CDH2, CUBN, EPHA7, ERBB3, FANCI, KDM6A, LMO1, MTUS2, NFKB1, PKHD1, PRPF8, PTPN12, PTPRD,
ROBO2, SYK
>201
CHRNA7, GABRA2, GABRB1, GABRB3, GABRG2, HMGCR, SLC6A3
>202
ABCA4, ABCB1, ACSS2, ADAM23, ADAMTS6, AGK, AKAP9, ANKRD30A, ANKS1B, ATRX, BMPR2, BRAF, C12orf42, CAMKMT, CASP8,
CCDC7, CD22, CDH10, CDH2, CFH, CNTLN, CYP19A1, CYP1A1, CYP3A5, DDIT4, DNAJC13, DYSF, EN1, EPHX1, EPHX2, ERBB3, ERBB4,
ESRRG, FRAS1, GRIK2, GRM8, GSTM2, HCN1, HMGCR, HMGN5, IL1RAPL1, ITGAX, KCNH8, KCTD16, KDM6A, KRT6B, KRTAP9-9,
LINGO2, LMO1, LRRK2, MAST4, MB21D2, MMP2, NCOA3, NUDT13, PDPN, PDS5B, PHACTR1, PRKAG2, PTPN22, PTPRD, ROBO2, SIL1,
SOD1, STAG2, TCHH, TEK, TNFSF11, UTRN, VPS13B, WWTR1, ZNF608
>203
ABCB1, ALDH5A1, ANK3, CNTNAP2, GABRA2, GABRB1, GABRB3, GABRG2, SLC6A3
>204
ABCA10, ABCA12, ABCA4, ACADS, AGK, ANKRD30A, ANO3, CCDC7, CDH10, CDH2, CFH, CNTNAP2, CTNND2, CUBN, DNAH11,
DNAH14, DNM3, EGR2, EPHX1, EVC, FAT4, GRID1, HMCN1, HMGN5, ITGAX, MTUS2, NCOA3, OPHN1, OSBPL1A, PKHD1, PTPRN2,
PXDNL, ROBO2, SLCO3A1, STAG2, TENM2, TLN2, TRHDE, TRIM36, UTRN, WDPCP
>205
ABCB1, ALDH5A1, ASIC2, CDH13, CNTN5, CTNNA3, DOCK4, GABRA2, GABRB1, GABRB3, GABRG2, HMGCR, ITGA8, ITGAM, NPR3,
PDE11A, PDE4D, SOD1
>206
ABCA12, ACADS, ANKKD30A, BMPR2, BRAF, CASP8, CCDC105, CDH2, CFH, CPNE8, CYP3A5, DCC, DDIT4, DISC1, DNAH11, ERBB3,
ESRRG, FAM184A, FOXP2, FRAS1, FUT8, GABRB1, GABRB3, HIVEP1, HMCN1, HSD17B4, KCTD8, KLHL3, MMP2, NCOA3, NFKB1,
PDE11A, PDPN, PDS5B, PKHD1, PTPN12, PTPRD, PTPRN2, RPL11, SH3RF3, TCHH, TEK, TENM2, THSD7B, TNFSF11, TRHDE, ULK4,
UTRN, VAV3, VCAM1
>207
ABCA4, ABCB1, ACSS2, ADAM23, ADAMTS6, AGK, AKAP9, ANKRD30A, ANKS1B, ATRX, BMPR2, BRAF, C12orf42, CAMKMT, CASP8,
CCDC7, CD22, CDH10, CDH2, CFH, CNTLN, CYP19A1, CYP1A1, CYP3A5, DDIT4, DNAJC13, DYSF, EN1, EPHX1, EPHX2, ERBB3, ERBB4,
ESRRG, FRAS1, GRIK2, GRM8, GSTM2, HCN1, HMGCR, HMGN5, IL1RAPL1, ITGAX, KCNH8, KCTD16, KDM6A, KRT6B, KRTAP9-9,
LINGO2, LMO1, LRRK2, MAST4, MB21D2, MMP2, NCOA3, NUDT13, PARD3, PDPN, PDS5B, PHACTR1, PRKAG2, PTPN22, PTPRD,
ROBO2, SIL1, SOD1, STAG2, SYK, TCHH, TEK, TNFSF11, UTRN, VAV3, VPS13B, WWTR1, ZNF608
>208
ANK3, CD28, CLN3, CTNND2, FAT4, ITGA8, LRRK2, NPHP1, PEX5, SGCZ, SYNE2
>209
ADH1C, ALDH5A1, CHRNA7, GABRA2, GABRB1, GABRB3, GABRG2, GRM5, HTR3B, SLC6A3
>210
ACOT7, ALDH5A1, ANK3, CHRNA7, CRYM, CTSB, CYP3A5, DAB1, DISC1, ERBB3, ERBB4, GABRA2, GABRB1, GABRB3, GABRG2,
GRID1, GRM4, GRM5, HMGCR, NELL1, PRKAG2, RIT2, SLC6A3, THOP1
>211
ABCA4, adenosine triphosphate, ADGRV1, AHI1, ASIC2, CASP8, CFH, CLN3, EYS, HGSNAT, HMCN1, MERTK, MFSD8, NPHP1, PRPF8,
RAB28, SOD1
>212
ABCA13, ABCA4, ABCB1, ACADSB, AHI1, ANK3, ANKRD30A, ARHGAP24, BRAF, CCDC7, CFH, CNTLN, CNTN5, CTNNA3, CTNND2,
CUBN, CWC27, CYP1A1, DNAH11, DNAH14, DYSF, EPHX1, EPHX2, FAT4, FRAS1, GRIK2, HIVEP1, IL15, KDM6A, MERTK, MMP2,
NEK11, OSBPL1A, OTOL1, PHACTR1, PKHD1, PPP2R2B, PRPF8, PXDNL, RPL11, SGCZ, SLC22A20, SLC24A3, SPAG17, STAG2, STAM,
SYNE2, TEK, THSD7B, TLN2, TNFSF11, ULK4, VPS13B, YTHDC2, ZBTB49, ZFPM2
>213
adenosine triphosphate, ARHGAP24, ATRX, BMPR2, CASR, CDH13, CDH2, CTSB, CYBB, CYP19A1, DDAH1, EPHX2, FRAS1, HSD17B4,
KRT6B, MERTK, MMP2, NCOA3, PROS1, RAB28, RILPL2, RNASE10, SMOC2, TBC1D32, TEK, TNFSF11, VCAM1
>214
ERBB3, GABRA2, GABRB1, GABRB3, GABRG2
>215
ABCB1, ANK3, BMPR2, BRAF, CASP8, CD28, CDH2, CPA4, CTSB, CYBB, CYP19A1, CYP3A5, DCC, DOCK4, EN1, ERBB3, ERBB4, ESRRG,
FAF1, FUT8, HYOU1, ICOS, IL15, KLHL3, mir-548, MMP2, NCOA3, NEK11, NFKB1, PARD3, PLOD2, PRPF8, SQSTM1, TEK, TNFSF11,
VAV3, VCAM1
>216
CASR, GABRA2, GABRB1, GABRB3, GABRG2, HMGCR, MMP2, PDE11A, PDE4D, PVT1, SLC6A3
>217
ADH1C, ALDH5A1, CHRNA7, GABRA2, GABRB1, GABRB3, GABRG2, GRM5, HTR3B, PDE11A, PDE4D, SLC6A3
>218
ADH1C, ALDH5A1, CHRNA7, GABRA2, GABRB1, GABRB3, GABRG2, GRM5, HTR3B, PDE4D, SLC6A3
>219
BMPR2, DCC, ERBB4, GABRB3, GRID2, ROBO2, SOD1, TENM2, VAV3, VAX1, VCAM1
>220
CHRNA7, CYP1A1, DAB1, DNAI1, GABRA2, GABRB1, GABRB3, GABRG2, OPHN1, ULK4
>221
ABCB1, ACSL4, adenosine triphosphate, AGK, ANO3, ASIC2, BMPR2, BRAF, CASP8, CASR, CD28, CDH13, CLN3, CRHR1, CTSB, CWC27,
CYP19A1, CYP1A1, CYP3A5, DCC, EGR2, ERBB3, ERBB4, ESRRG, FOXN3, FUT8, GABRA2, GALNT2, GPC5, HMGCR, HPGD, HYAL1,
ICOS, IL15, IQGAP2, KLHL3, LMO1, LUZP2, MMP2,
NCOA3, NFKB1, NRG3, PDE4D, PDS5B, phosphate, PLOD2, PPP2R2B, PPT1, PRMT6, PRPF8, PTPN22, RAPGEF2, SOD1, STAG2, SYK,
TEK, TNFSF11, UTRN, UVRAG, VAV3, VCAM1, WWTR1
>222
CASP8, CD22, CD28, CYBB, IL15
>223
ABCB1, ACADSB, ALOX5, ANKRD30A, CD22, CD28, CHRNA7, CLN3, CYBB, CYP3A5, DYSF, FAM172A, GABRA2, GABRB1, GABRB3,
GABRG2, HMGCR, MERTK, NFKB1, PCTP, PDE11A, PDE4D, PLOD2, PRPF8, PTPRN2, PVT1, RAB28, SLC6A3, STARD3NL, SUCLG2,
TRIM5, XKR4, YTHDC2
>224
CHRNA7, GABRA2, GABRB1, GABRB3, GABRG2, GIF, GRM5, HMGCR, SLC6A3
>225
ADGRB3, ATRX, BRAF, CAPN3, CNTNAP2, ERBB4, GABRA2, KDM6A, LRRK2, MERTK, PDPN, PTPRD, RAPGEF2, SLCO3A1, STAG2,
TUSC3, VAV3, VCAM1
>226
ABCA4, ANO3, BMPR2, BRAF, CASR, CNTN5, CRYM, CYP19A1, DYSF, EGR2, EPHX2, ERBB4, EVC, FGF14, GABRG2, HCN1, HMGCR,
KLHL3, LARS2, LBR, LRRK2, PLOD2, PPP2R2B, PROS1, PRPF8, SLC6A3, SMOC2, SOD1, SQSTM1, SYNE2, TMC1
>227
ABCA13, ABCA4, ABCB1, ACADSB, ANK3, ANKRD30A, ARHGAP24, BRAF, CCDC7, CFH, CNTLN, CNTN5, CTNNA3, CTNND2, CUBN,
CWC27, CYP1A1, DNAH11, DNAH14, DYSF, EPHX1, EPHX2, FAT4, FRAS1, GRIK2, HIVEP1, IL15, KDM6A, MERTK, MMP2, NEK11,
OSBPL1A, OTOL1, PHACTR1, PKHD1, PPP2R2B, PRPF8, PXDNL, RPL11, SGCZ, SLC22A20, SLC24A3, SPAG17, STAG2, STAM, SYNE2,
TIISD7B, TLN2, TNFSF11, ULK4, VPS13B, YTIIDC2, ZBTB49, ZFPM2
>228
ABCB1, ALOX5, DCC, GRM8, HPGD, NELL1, NFKB1, NKAIN2, PDE4D, PPP2R2B, SLC6A3, TBC1D32, TENM4
>229
adenosine triphosphate, CNTNAP2, DISC1, EN1, GABRB3, GRID1, GRM8, OPIIN1, PDE11A
>230
ACADS, ACADSB, ACSL4, adenosine triphosphate, ADH1C, ALOX5, CYP19A1, CYP1A1, CYP3A5, ESRRG, HPGD, HSD17B4, IL15, PEX5,
PPARGC1A, PRKAG2
>231
CASR, GABRA2, GABRB3, GABRG2, HTR3B, SLC6A3
>232
BRAF, ERBB3, ERBB4, NEK11, NFKB1, TEK
>233
ABCB1, ALOX5, DCC, GABRB3, GRM8, HPGD, MERTK, MMP2, NELL1, NFKB1, NKAIN2, PDE4D, PPP2R2B, SLC6A3, TBC1D32, TENM4
>234
ACADSB, AHI1, ATRX, CYP19A1, CYP1A1, FRAS1, GABRA2, GABRB1, GABRB3, GABRG2, HMGCR, HSD17B4, ITGA8, LARS2, NPHP1,
PKHD1, WDPCP, WWTR1, ZFPM2
>235
adenosine triphosphate, ALOX5, ARHGEF4, BMPR2, BRAF, CASR, CTNND2, CTSB, CYBB, CYP19A1, DCC, DOCK4, ERBB3, FUT8, GALNT2,
GPC5, HMGCR, HPGD, HYAL1, HYOU1, ICOS, IL15, IQGAP2, ITGAM, LRRK2, MMP2, NCOA3, PDE4D, phosphate, PLCL1, PPARGC1A,
PPP2R2B, SQSTM1, TSC22D1, TUSC3, UVRAG, VAV3
>236
ADCY8, CHRNA7, CYBB, GABRA2, GABRB1, GABRB3, GABRG2, HMGCR, HYOU1, NFKB1, PDE4D, PROS1, SLC6A3, TNFSF11, VCAM1
>237
ABCB1, ADCY8, adenosine triphosphate, CASP8, CDH2, CHRNA7, CRYM, EGR2, EPHX2, ESRRG, FGF14, FOXN3, GABRA2, GABRB1,
GABRB3, GABRG2, GPR6, GRIK2, HMGCR, ITGAM, MERTK, NFKB1, PCTP, phosphate, PLOD2, PPARGC1A, PPT1, SLC6A3, SOD1,
WWTR1, XK
>238
GABRA2, GABRB1, GABRB3, GABRG2, HMGCR, SYK, VAV3
>239
ADGRB3, ANK3, BRAF, CDH2, CNTNAP2, CRHR1, CTNND2, CYP19A1, DAB1, DCC, DDAH1, EPHA7, ERBB4, FUT8, GRID2, GRM4,
GRM5, IL1RAPL1, LRRK2, NFKB1, OPHN1, PARD3, PTPN20, RAPGEF2, RAPSN, RIT2, ROBO2, SOD1, TENM4
>240
ADGRV1, AGBL4, ANK3, CASP8, CRHR1, CTSB, CYBB, ERBB3, GABRB3, GRID1, GRID2, HSD17B4, LRRK2, NFKB1, PPARGC1A, PPT1,
SOD1, SQSTM1
>241
BRAF, CFH, CHRNA7, CLN3, CNTNAP2, DNM3, EPHA7, GRID2, LHX8, LRRK2, NFKB1, OPHN1, PARD3, PDS5B, PPARGC1A, RAPSN,
ROBO2, SOD1, SYNE2, UTRN, XK
>242
CD22, DISC1, GABRB3, PDE11A, PPARGC1A, SLC6A3
>243
ATRX, CYP19A1, CYP1A1, GABRA2, GABRB1, GABRB3, GABRG2, HSD17B4, LARS2, ZFPM2
>244
AGBL4, ANK3, CTSB, GRID2, HSD17B4, LRRK2, PPT1, SOD1
>245
AGBL4, ANK3, CTSB, GRID2, HSD17B4, PPT1
>246
ABCB1, ANK3, BMPR2, BRAF, CASP8, CD28, CDH2, CFH, CPA4, CTSB, CYBB, CYP19A1, CYP3A5, DCC, DOCK4, EN1, ERBB3, ERBB4,
ESRRG, FAF1, FUT8, HYOU1, ICOS, IL15, KLHL3, mir-548, MMP2, NCOA3, NEK11, NFKB1, PARD3, PLOD2, PRPF8, SQSTM1, TEK,
TNFSF11, VAV3, VCAM1, ZFPM2
>247
ABCA10, BRAF, CD22, CYP1A1, CYP3A5, HMCN1, IL15, LMO1, NCOA3, PARD3, PTPRD, SLC6A3, SYK, TEK
>248
adenosine triphosphate, ANKS1B, CASR, CNTNAP2, GRIK2, GRM5, OPHN1
>249
ABCA4, adenosine triphosphate, ADGRV1, AHI1, ASIC2, CASP8, CFH, CLN3, EYS, HGSNAT, HMCN1, MERTK, MFSD8, NPHP1, PRPF8,
RAB28
>250
ADCY8, ATRX, BRAF, CYP1A1, DCC, ERBB3, EYS, KDM6A, LRRK2
>251
ADAMTS6, CD22, CD28, CFH, CTSB, CXCL13, CYBB, DYM, ERBB3, FGF14, FSTL4, HMGCR, ICOS, ITGAX, MERTK, NFKB1, NRG3,
PPP2R2B, PTPN22, PXDNL, RTP4, SGCZ, VCAM1
>252
ACSL4, adenosine triphosphate, AGK, AKAP9, ALOX5, ARHGAP24, ARHGEF4, BMPR2, BRAF, CASP8, CASR, CD22, CD28, CDH13, CDH2,
CFH, CHRNA7, CNTNAP2, CTNND2, CTSB, CXCL13, CYBB, CYP19A1, CYP1A1, DAB1, DCC, DDIT4, DISC1, DNAH11, DNAI1, DOCK4,
EGR2, EN1, ERBB3, ERBB4, FAF1, FUT8, GALNT2, GRID2, HYAL1, HYOU1, ICOS, IL15, ITGA8, ITGAM, ITGAX, KRT6B, LDHC, LRRK2,
MERTK, MMP2, NCOA3, NFKB1, PARD3, PDPN, PEX5, PHACTR1, PLCL1, PRMT6, PROS1, PTPN12, RAB28, RAPGEF2, ROBO2,
SEMA6D, SOD1, SQSTM1, SYK, SYNE2, TEK, TNFSF11, TUSC3, UTRN, VAV3, VAX1, VCAM1, WDPCP, WWTR1
>253
CHRNA7, CRHR1, CYBB, EPHX1, FUT8, GABRA2, GABRB1, GABRB3, GABRG2, HMGCR, PDE11A, PDE4D
>254
adenosine triphosphate, ANKS1B, ASIC2, CASR, CDH2, CHRNA7, CNTNAP2, FGF14, GABRG2, GRID2, GRIK2, GRM4, GRM5, GRM8,
HTR3B, NFKB1, OPHN1, RAPSN, RIT2
>255
BRAF, CDH2, CFH, CHRNA7, CLN3, CNTNAP2, DNM3, EPHA7, GRID2, GRM5, LHX8, LRRK2, NFKB1, OPHN1, PARD3, PDS5B,
PPARGC1A, RAPSN, ROBO2, SOD1, SYNE2, UTRN, XK
>256
ABCB1, ACADSB, ALOX5, ANKRD30A, CD22, CD28, CHRNA7, CLN3, CYBB, CYP3A5, DYSF, FAM172A, GABRA2, GABRB1, GABRB3,
GABRG2, HMGCR, NFKB1, PCTP, PDE11A, PDE4D, PLOD2, PRPF8, PTPRN2, PVT1, RAB28, SLC6A3, STARD3NL, SUCLG2, TRIM5,
XKR4, YTHDC2
>257
CASR, GABRA2, GABRB1, GABRB3, GABRG2, HTR3B, SLC6A3
>258
ABCB1, adenosine triphosphate, CASP8, CDH2, CHRNA7, CRYM, EGR2, EPHX2, ESRRG, FGF14, FOXN3, GABRA2, GABRB1, GABRB3,
GABRG2, GPR6, GRIK2, HMGCR, ITGAM, MERTK, NFKB1, PCTP, phosphate, PLOD2, PPARGC1A, PPT1, SLC6A3, WWTR1, XK
>259
ABCB1, ACADSB, ALOX5, ANKRD30A, CD22, CD28, CHRNA7, CLN3, CTSB, CYBB, CYP3A5, DYSF, FAM172A, GABRA2, GABRB1,
GABRB3, GABRG2, HMGCR, ITGAM, MERTK, NFKB1, PCTP, PDE11A, PDE4D, PLOD2, PRPF8, PTPRN2, PVT1, RAB28, RIT2, SLC6A3,
STARD3NL, SUCLG2, TRIM5, XK, XKR4, YTHDC2
>260
ABCA12, ABCB1, ACADS, adenosine triphosphate, ADGRL2, AGK, AGXT, AHI1, ALOX5, CASR, CES3, CFH, CHRNA7, CRHR1, ERBB3,
GRID2, GRM4, GRM8, ICOS, P3II1, PCTP, PLCL1, PPT1, PTPRN2, SLC6A3, SOD1, STXBP5L, SYK
>261
ADCY8, ADH1C, ATRX, BRAF, CYP1A1, DCC, ERBB3, EYS, KDM6A, LRRK2, MMP2
>262
ALDII5A1, GABRA2, GABRB1, GABRB3, GABRG2, SLCGA3
>263
ABCC6, BMPR2, BRAF, CDH2, CFH, CTSB, CYBB, DDAH1, EPHX2, HPGD, IL15, MERTK, MMP2, PDPN, PKHD1, PROS1, PTPN12,
RAPGEF2, SYK, TEK, VAV3
>264
CAPN3, CASP8, CDH2, COL19A1, CTNNA3, CYBB, CYP19A1, DYSF, ERBB3, MMP2, PDPN, PPARGC1A, TLN2, UTRN, VAV3, VCAM1, XK,
ZFPM2
>265
GABRB3, GABRG2, IICN1
>266
ERBB3, ERBB4, TNFSF11
>267
ABCA12, BARX1, BMPR2, DCC, DNM3, EGR2, EN1, ERBB3, FAT4, GABRB3, IIPGD, IISD17B4, KDMGA, LIIX8, MMP2, NFKB1, PDPN,
PDS5B, PPARGC1A, PROS1, RAPSN, ROBO2, SC5D, SYK, SYNE2, VAX1, WDPCP
>268
AH11, ANK3, CLN3, EN1, ERBB3, GABRB3, GRID2, IL1RAPL1, MERTK, PPAKGC1A
>269
ALDH5A1, CASP8, DAB1, ERBB4, GABRA2, GABRB1, GABRB3, GABRG2, HMGCR, ITPR2, SOD1, SQSTM1, SUSD1, WWTR1
>270
ABCA4, ABCB1, ADGKB3, ATRX, BRAF, CADM2, CDH2, CFH, COL19A1, CTSB, CUBN, CYP19A1, DCC, EPHA7, EKBB3, ERBB4, ESRRG,
FANCI, HMGCR, HYAL1, IQGAP2, KDM6A, LMO1, LRRK2, MMP2, MTUS2, NFKB1, OSBPL1A, PDS5B, phosphate, PKHD1, PRPF8,
PTPN12, PTPRD, ROBO2, SLC24A3, STAG2, SYK, TEK, UTRN, VAV3, VCAM1, ZFPM2
>271
CHRNA7, GABRA2, GABRB1, GABRB3, GABRG2, GLRA2, SLC6A3
>272
BMPR2, BRAF, CASP8, CD2AP, CDH2, CFH, CTNNA3, CYBB, DDAH1, DNAH11, ERBB3, ERBB4, FAT4, HPGD, IL15, MERTK, MMP2,
PARD3, PDPN, PDS5B, PPARGC1A, PROS1, RAPGEF2, SYK, TEK, VAV3, VCAM1, ZFPM2
>273
GABRA2, GABRB1, GABRB3, GABRG2, GRM5, SLC6A3
>274
adenosine triphosphate, ANK3, CDH2, CHRNA7, CLN3, GRID2, GRIK2, GRM5, HCN1, KCNE1, OPHN1
>275
adenosine triphosphate, BMPR2, CYP19A1, EGR2, EN1, MMP2, NFKB1, NPR3, OSCAR, PDS5B, PLCL1, SOD1, SQSTM1, TNFSF11, WWTR1
>276
GABRA2, GABRB1, GABRB3, GABRG2
>277
BMPR2, BRAF, CASP8, CD2AP, CDH2, CFH, CTNNA3, CYBB, DDAH1, DNAH11, ERBB3, FAT4, HPGD, IL15, MERTK, MMP2, PARD3,
PDPN, PDS5B, PPARGC1A, PROS1, SYK, TEK, VAV3, VCAM1, ZFPM2
>278
ALOX5, CHRNA7, GABRA2, GABRB1, GABRB3, GABRG2, HMGCR
>279
adenosine triphosphate, CXCL13, ITGAM, ITGAX, MMP2, VCAM1
>280
ADCY8, adenosine triphosphate, AHI1, CLN3, CRHR1, CYP19A1, DAB1, EN1, FGF14, GABRB3, GRID2, GRM5, LRRK2, PDE11A,
PPARGC1A, PPT1, SLC6A3, SOD1, SQSTM1
>281
CXCL13, CYP19A1, ICOS, IL15, NFKB1, PDPN, PTPN22, TNFSF11
>282
ALOX5, CHRNA7, CYBB, CYP19A1, GABRA2, GABRB1, GABRB3, GABRG2, HYOU1, NFKB1, PPARGC1A, SLC6A3, SOD1
>283
GABRA2, GABRB1, GABRB3, GABRG2, SLC6A3, ULK4
>284
BARX1, CRHR1, CYP19A1, DMRTA1, ERBB3, ERBB4, FAT4, FRAS1, GRID2, IL15, IMMP2L, ITGA8, LHX8, LRRK2, MMP2, NFKB1,
PKHD1, PTPN12, PTPRN2, RAPGEF2, ROBO2, SOD1, TNFSF11, TSC22D1, VCAM1, WDPCP, WWTR1
>285
CLN3, DYSF, GABRB3, GABRG2, PPARGC1A, PPT1, STAM
>286
adenosine triphosphate, CASR, GRM5, ITGAM, ITPR2, PDE4D, TNFSF11
>287
adenosme triphosphate, ATRX, BRAF, CASP8, CDH2, CHRNA7, CLN3, CRHR1, CTSB, CYBB, DCC, EN1, EPHA7, EPHX2, ERBB3, GABRB3,
GRID2, GRIK2, GRM4, GRM5, HYOU1, ITPR2, LRRK2, NFKB1, PPARGC1A, PPP2R2B, PPT1, RAPSN, RNF19A, SLC6A3, SOD1, STAM,
>288
ABCA4, ABCB1, ACOT7, ACSL4, ACSS2, adenosine triphosphate, ADH1C, AGK, ALOX5, BMPR2, CASP8, CASR, CLN3, CRHR1, CYP19A1,
CYP1A1, DAB1, DLD, EPHX2, ERBB4, ESRRG, GRM5, HMGCR, HPGD, IL15, JAZF1, MMP2, NFKB1, PARD3, PCTP, PPARGC1A, PRKAG2,
SOD1, SYK
>289
CD28, ICOS, MERTK, VCAM1
>290
GABRA2, GABRB1, GABRB3, GABRG2
>291
ANKRD30A, CCDC178, CNTLN, DYM, FRAS1, GLRA2, GRM5, KDM6A, KRTAP9-8, SPAG17, TRIM36, ULK4, VAV3
>292
ABCA4, ABCC6, CFH
>293
ALOX5, GABRA2, GABRB1, GABRB3, GABRG2, SLC6A3
>294
ABCA4, ABCB1, ADH1C, CYP3A5, PCTP, PPT1
>295
ABCB1, ACADSB, ALOX5, ANKRD30A, CD22, CD28, CHRNA7, CLN3, CYBB, CYP3A5, DYSF, FAM172A, GABRA2, GABRB1, GABRB3,
GABRG2, HMGCR, NFKB1, PCTP, PDE11A, PDE4D, PLOD2, PRPF8, PTPRN2, PVT1, RAB28, SLC6A3, STARD3NL, SUCLG2, XKR4,
YTHDC2
>296
ABCB1, GABRA2, GABRB1, GABRB3, GABRG2, HTR3B, PDE11A
>297
ABCA4, ADGRV1, AGBL4, AHI1, ANK3, CASP8, CTSB, DYSF, ERBB3, GABRB3, GRID1, GRID2, HSD17B4, LRRK2, MERTK, NFKB1,
PPARGC1A, PPT1, SOD1
>298
ADCY8, adenosine triphosphate, CDH2, CHRNA7, CRHR1, CYBB, CYP19A1, ERBB4, GABRG2, GRIK2, GRM5, ITGA8, SLC6A3, SOD1, VAV3
>299
DCC, EGR2, EN1, ERBB3, ERBB4, GABRB3, SOD1, VAX1
>300
ADCY8, ATRX, BRAF, DCC, ERBB3, EYS, KDMGA, LRRK2
>301
ATRX, CYP19A1, GABRA2, GABRB1, GABRB3, GABRG2, HSD17B4, LARS2, ZFPM2
>302
ACSS2, adenosine triphosphate, ALOX5, IIMGCR, IIPGD, IISD17B4
>303
ABCB1, CHRNA7, GABRA2, GABRB1, GABRB3, GABRG2, GLRA2, PDE4D, SLC6A3
>304
ACSL4, BRAF, CYP19A1, ERBB4, FAT4, PARD3, PKIID1, ROBO2, WDPCP, WWTR1
>305
ABCA12, PDS5B
>306
MERTK, PROS1
>307
HMGCR, ITGAM
>308
ALDII5A1, CLN3
>309
ALDH5A1, CLN3
>310
BRAF, TSC22D1
>311
CNTNAP2, CRHR1, CYP19A1, ERBB4, GABRG2, GRIK2, GRM5, LRRK2, NFKB1, OPHN1, PPT1, PTPRN2, ROBO2, SLC6A3, TPST1
>312
ABCB1, CHRNA7, GABRA2, GABRB1, GABRB3, GABRG2, HMGCR, SLC6A3
>313
GABRA2, GABRB1, GABRB3, GABRG2, HTR3B
>314
FAT4, PARD3, PKHD1, ROBO2, WDPCP, WWTR1
>315
ABCA10, ADAM23, AGBL4, AHI1, AKAP9, ANK3, BMPR2, BRAF, CASR, CCDC7, CNTLN, CTNNA3, CUBN, DNAH14, DYM, DYSF, ERBB3,
FAT4, FOXP2, FSTL4, GRIK2, GRM8, IQGAP2, ITGAX, KCNH8, KCTD16, LRRK2, MTUS2, OSBPL1A, PHACTR1, RAPGEF2, RAPSN,
ROBO2, SH3RF3, TCHH, VPS13B
>316
ADGRV1, ALDH5A1, ANK3, CHRNA7, CLN3, CNTNAP2, CRYM, EGR2, GABRA2, GABRB1, GABRB3, GABRG2, GRIK2, GRM5, HCN1,
HYOU1, PLCL1, PPT1, PTPRN2, STAM
>317
CLN3, CNTNAP2, DAB1, DCC, OPHN1, PPARGC1A, PPT1, ROBO2, TENM2, ULK4, VAX1
>318
GABRA2, GABRB1, GABRB3, GABRG2
>319
adenosine triphosphate, CD28, ICOS, IL15
>320
GABRA2, GABRB1, GABRB3, GABRG2
>321
ALDH5A1, GABRA2, GABRB1, GABRB3, GABRG2
>322
GABRA2, GABRB1, GABRB3, GABRG2, SLC6A3
>323
adenosine triphosphate, CYP19A1, EGR2, MMP2, NFKB1, NPR3, OSCAR, PLCL1, SOD1, SQSTM1, TNFSF11
>324
ABCB1, ADH1C, ALDH5A1, CAPN3, GASP8, CHRNA7, CTNNA3, DAB1, DNAJC13, ERBB4, GABRA2, GABRB1, GABRB3, GABRG2,
HMGCR, ITPR2, LRRK2, MERTK, PDE4D, SLC24A3, SLC6A3, SOD1, SQSTM1, SUSD1, WWTR1
>325
ABCB1, adenosine triphosphate, ADH1C, CAPN3, CASP8, CDH2, CHRNA7, CRYM, CTNNA3, DNAJC13, EGR2, EPHX2, ESRRG, FOXN3,
GABRA2, GABRB1, GABRB3, GABRG2, GPR6, GRIK2, HMGCR, ICOS, ITGAM, LRRK2, MERTK, NFKB1, PCTP, PDE4D, phosphate, PLOD2,
PPARGC1A, RAPSN, SLC24A3, SLC6A3, SOD1, SQSTM1, WWTR1
>326
ACSL4, adenosine triphosphate, BMPR2, CASP8, CD28, CLN3, CYP19A1, CYP3A5, ERBB3, ERBB4, ESRRG, HPGD, NCOA3, PDS5B,
phosphate, PPP2R2B, PRMT6, SOD1, SYK, TEK, UTRN, WWTR1
>327
CD28, CXCL13, EGH2, ICOS, PDPN, TNFSF11
>328
adenosine triphosphate, CXCL13, CYP19A1, EGR2, GRID1, ITGAM, MMP2, NFKB1, NPR3, OSCAR, PLCL1, SOD1, SQSTM1, TNFSF11
>329
ACSL4, adenosine triphosphate, AGK, AKAP9, ALOX5, ARHGAP24, ARHGEF4, BMPR2, BRAF, CASP8, CASR, CD22, CD28, CDH13, CDH2,
CFH, CHRNA7, CNTNAP2, CTSB, CXCL13, CYBB, CYP19A1, CYP1A1, DAB1, DCC, DDIT4, DISC1, DOCK4, EGR2, ERBB3, ERBB4, FAF1,
FUT8, GALNT2, HYAL1, HYOU1, ICOS, IL15, ITGA8,
ITGAM, ITGAX, KRT6B, LRRK2, MERTK, MMP2, NCOA3, NFKB1, PDPN, PEX5, PHACTR1, PLCL1, PRMT6, PROS1, PTPN12,
RAB28, RAPGEF2, ROBO2, SEMA6D, SOD1, SYK, SYNE2, TEK, TNFSF11, TUSC3, VAV3, VAX1, VCAM1, WDPCP, WWTR1
>330
GABRA2, GABRB1, GABRB3, GABRG2
>331
ERBB3, ERBB4, NFKB1, TNFSF11
>332
ADGRB3, EN1, GRID2, GRM4, HCN1
>333
ABCB1, adenosine triphosphate, ADH1C, CAPN3, CASP8, CDH2, CHRNA7, CRYM, CTNNA3, DNAJC13, EGR2, EPHX2, ESRRG, FOXN3,
GABRA2, GABRB1, GABRB3, GABRG2, GPR6, GRIK2, HMGCR, ITGAM, LRRK2, MERTK, NFKB1, PCTP, PDE4D, phosphate, PLOD2,
PPARGC1A, SLC6A3, SOD1, WWTR1
>334
CHRNA7, CLN3, CTSB, DAB1, ERBB3, GRID1, MERTK, OPHN1, PEX5, PPARGC1A, PPT1, PROS1
>335
ADGRV1, AGBL4, ANK3, CTSB, ERBB3, GABRB3, GRID1, GRID2, HSD17B4, LRRK2, NFKB1, PPARGC1A, PPT1, SOD1, SQSTM1
>336
CASR, CYP3A5, HMGCR, ICOS, MMP2
>337
CASP8, ERBB3, ERBB4, PDPN, TEK
>338
GABRA2, GABRB1, GABRB3, GABRG2, SLC6A3
>339
adenosine triphosphate, CYP19A1, FOXP2, IL1RAPL1, STAM, VWC2
>340
ABCA12, AGXT, AKAP9, BMPR2, BRAF, CCDC178, CCDC7, DOCK4, DYSF, ERBB3, GRIK2, KCTD16, PDS5B, ULK4, UTRN, UVRAG
>341
BRAF, CDH2, DAB1, FOXP2, LHX8, LRRK2, PARD3, ROBO2, ULK4, VAX1
>342
ACADS, ACADSB, ACSL4, adenosine triphosphate, ADH1C, CYP19A1, ESRRG, HPGD, HSD17B4, PEX5, PPARGC1A, PRKAG2
>343
GRID1, NFKB1, SOD1
>344
ERBB3, ERBB4, NFKB1
>345
CLN3, CYBB, PROS1, SOD1
>346
CLN3, LRRK2, MFSD8, PPT1
>347
GABRA2, GABRB1, GABRB3, GABRG2
>348
BRAF, ERBB3, ERBB4, NEK11
>349
ANK3, CHRNA7, GABRA2, GABRB1, GABRB3, GABRG2, SLC6A3
>350
ABCA12, ABCB1, ACADS, adenosine triphosphate, AGK, ALOX5, CES3, CFH, CRHR1, GKM4, PCTP, PTPKN2, SOD1
>351
ALDH5A1, GABRA2, GABRB1, GABRB3, GABRG2, GRM5, HTR3B, SLC6A3
>352
CRHR1, ERBB4, GABRG2, GRM5, NFKB1, PTPRN2
>353
ABCA12, BMPR2, CRHR1, FAT4, FUT8, HYAL1, ITGA8, LRRK2, PDPN, PPARGC1A, SYK
>354
adenosine triphosphate, CASR, CHRNA7, GRIK2, NFKB1, PKHD1, SLC24A3, SOD1, TNFSF11, XK
>355
ATRX, CHRNA7, ERBB3, PPARGC1A
>356
GABRA2, GABRB1, GABRB3, GABRG2
>357
ACSL4, GRIK2, OPHN1, TUSC3
>358
CAPN3, CASP8, CDH2, COL19A1, CTNNA3, CYBB, DYSF, ERBB3, MMP2, PDPN, PPARGC1A, TLN2, VAV3, VCAM1, XK, ZFPM2
>359
ABCB1, ACSL4, ALOX5, BARX1, CASP8, CD2AP, CFH, CLN3, CRHR1, CYBB, CYP19A1, CYP1A1, ERBB3, ESRRG, FAT4, HYAL1, ICOS,
IL15, IQGAP2, ITGA8, LRRK2, MERTK, NFKB1, PCTP, PEX5, PKHD1, PPARGC1A, PPT1, PTPN22, ROBO2, SC5D, SOD1, TNFSF11,
WDPCP, ZFPM2
>360
CD2AP, DNAJC13, LRRK2, NFKB1, SOD1, TMC1
>361
ANK3, CDH2, DCC, EGR2, ERBB4, OPHN1, ROBO2, TENM2, VAV3, VAX1
>362
GABRA2, GABRB1, GABRB3, GABRG2, HMGCR, MMP2, SLC6A3, SOD1, VCAM1, ZFPM2
>363
CASR, CYP1A1, GABRA2, GABRB1, GABRB3, GABRG2, HMGCR, MMP2, PDE11A, PDE4D, phosphate, PVT1, SLC6A3, TNFSF11
>364
GABRA2, GABRB1, GABRB3, GABRG2, GRM5, SLC6A3
>365
ABCA4, CFH, CLN3, MERTK, PPT1, SOD1, TENM2
>366
GABRB1, PDE4D, SLC6A3
>367
adenosine triphosphate, DAB1, LIPG
>368
ADGRV1, AGBL4, ANK3, CRHR1, CTSB, CYBB, ERBB3, GABRB3, GRID1, GRID2, HSD17B4, LRRK2, NFKB1, PPARGC1A, PPT1, SOD1,
SQSTM1
>369
BMPR2, CASP8, CD2AP, CDH2, CTNNA3, CYBB, DNAH11, ERBB3, ERBB4, FAT4, MMP2, PARD3, PDPN, PDS5B, PPARGC1A, TEK, VAV3,
VCAM1, ZFPM2
>370
ADCY8, CHHNA7, CRHR1, EHBB4, GABRG2, GRM5, GRM8, HSD17B4, NFKB1, OPHN1, PTPRN2, SLC6A3
>371
CD22, CHRNA7, IL15, NFKB1
>372
ADGRL2, ALDH5A1, CASP8, CD2AP, CHRNA7, CTNNA3, CTSB, DLGAP2, DYSF, GABRA2, GABRB1, GABRB3, GABRG2, GRM4, GRM5,
GRM8, HMGCR, LDLRAP1, MMP2, MS4A4E, PROS1, SC5D, SLC6A3, SOD1, VPS13B
>373
ADGRL2, ALDH5A1, CASP8, CD2AP, CHRNA7, CTNNA3, CTSB, DLGAP2, DYSF, GABRA2, GABRB1, GABRB3, GABRG2, GRM4, GRM5,
GRM8, HMGCR, LDLRAP1, MMP2, MS4A4E, PROS1, SC5D, SLC6A3, SOD1, SQSTM1, VPS13B
>374
ADGRV1, AGBL4, ANK3, CTSB, ERBB3, GABRB3, GRID1, GRID2, HSD17B4, LRRK2, NFKB1, PPARGC1A, PPT1, SOD1
>375
ACADS, ACOT7, ADAM23, AGXT, AKAP8, ALDH5A1, ANKRD30A, ATRX, BRAF, CADM2, CUBN, CWC27, CYP1A1, DNAH14, EPHX1,
ERBB3, ERBB4 FAM122C, GABRA2, GABRB1, GABRB3, GABRG2, HMCN1, HMGCR, HSD17B4, ITGAX, KDM6A, KRTAP9-4, LRRK2,
MAST4, MMP2, NCOA3, PKHD1, PLOD2, PRKAG2, ROBO2, SCG3, STAG2, TEK, XK, YTHDC2
>376
ABCB1, ALOX5, CHRNA7, GABRA2, GABRB1, GABRB3, GABRG2
>377
ABCB1, GABRA2, GABRB1, GABRB3, GABRG2, HTR3B, PDE11A
>378
ALOX5, CHRNA7, CYBB, CYP19A1, GABRA2, GABRB1, GABRB3, GABRG2, HYOU1, LRRK2, NFKB1, PPARGC1A, SLC6A3, SOD1
>379
ABCA4, ABCB1, ADH1C, CYP3A5, PCTP
>380
adenosine triphosphate, ANKS1B, GRIK2, GRM5, OPHN1
>381
BRAF, CHRNA7, CNTNAP2, CRHR1, CYBB, GRM5, HCN1, HMGCR, ITGA8, OPHN1, SLC6A3
>382
CHRNA7, CLN3, CTSB, DAB1, ERBB3, MERTK, OPHN1, PEX5, PPARGC1A, PPT1, PROS1
>383
CHRNA7, GABRA2, GABRB1, GABRB3, GABRG2, SLC6A3
>384
ABCA4, ADGRV1, AGK, BRAF, EYS, IIGSNAT, MERTK, MFSD8, NPIIP1, OCA2, PRPF8, RAB28, SOD1, VAX1
>385
adenosine triphosphate, FOXP2, IL1RAPL1, STAM
>386
AIII1, AKAP9, BBS5, BBS9, BRAF, DISC1, PKIID1, TBC1D32, ULK4, WDPCP, WWTR1
>387
CYP19A1, GABRA2, GABRB1, GABRB3, GABRG2
>388
AKAP9, CDII13, DOCK4, ITGAM, NFKB1, PTPN12, WWTR1
>389
PPT1, TENM2
>390
CD28, ICOS
>391
CTSB, SQSTM1
>392
CD28, ICOS
>393
CHRNA7, NCOA3
>394
ABCB1, BRAF
>395
ITGAM, ITGAX
>396
EGR2, FAF1
>397
SOD1, SQSTM1
>398
CYP19A1, ESRRG
>399
ABCC6, XYLT1
>400
ERBB3, ERBB4
>401
BMPR2, CASP8, CD2AP, CDH2, CTNNA3, CYBB, DNAH11, ERBB3, FAT4, MMP2, PARD3, PDPN, PDS5B, PPARGC1A, TEK, VAV3,
VCAM1, ZFPM2
>402
DCC, EGR2, EN1, ERBB3, ERBB4, GABRB3, SOD1, SYNE2, VAX1
>403
ACSL4, CYP19A1, ERBB4, FAT4, PARD3, PKHD1, ROBO2, WDPCP
>404
AHI1, BMPR2, ERBB3, ERBB4, PTPRD, SYK, TEK
>405
CLN3, CNTNAP2, DAB1, DCC, ERBB3, OPHN1, PPARGC1A, PPT1, ROBO2, TENM2, ULK4, VAX1
>406
adenosine triphosphate, CDH2, KCNE1
>407
ABCA4, adenosine triphosphate, CASP8, CFH, HMCN1
>408
CTSB, GRID2, PPARGC1A, PPT1, SOD1, SQSTM1
>409
ANO3, CDH13, CWC27, GPC5, LUZP2, SYK
>410
ALOX5, BMPR2, BRAF, CASP8, CHRNA7, CRHR1, CYP19A1, GABRA2, GABRB1, GABRB3, GABRG2, HMGCR, MERTK, PDE4D, PROS1,
SPRED2, SYK, TEK, ULK4, ZFPM2
>411
CASP8, CDH2, CTNNA3, CYBB, ERBB3, PDPN, PPARGC1A, VAV3, VCAM1, ZFPM2
>412
ABCB1, ADH1C, CAPN3, CHRNA7, CTNNA3, DNAJC13, GABRA2, GABRB1, GABRB3, GABRG2, LRRK2, PDE4D, SLC6A3, SOD1
>413
ABCA12, ACADS, ANKRD30A, BRAF, CCDC105, CPNE8, DCC, DDIT4, DISC1, DNAH11, ESRRG, FAM184A, FOXP2, FRAS1, FUT8,
GABRB1, HIVEP1, HMCN1, HSD17B4, KCTD8, NCOA3, PTPN12, PTPRD, RPL11, SH3RF3, TCHH, TEK, TENM2, THSD7B, TNFSF11,
TRHDE, ULK4, VCAM1
>414
BMPR2, CASP8, CTNNA3, ERBB3, ERBB4, MMP2, PDPN, PPARGC1A, TEK, VCAM1, ZFPM2
>415
GABRA2, GABRB1, GABRB3, GABRG2, HCN1, HTR3B, SLC6A3
>416
ABCA12, ABCA4, ABCB1, BRAF, CFH, CLN3, CYP19A1, ERBB3, IQGAP2, KRT6B, LRRK2, MERTK, PCTP, PDPN, SOD1, SYK, SYNE2,
TEK, TNFSF11
>417
EGR2, ERBB4, GABRB3, SOD1
>418
GABRA2, GABRB1, GABRB3, GABRG2
>419
ABCA12, CASR, CYP19A1, EPHX2, HMGCR, HSD17B4, LDLRAP1, LIPG, PPARGC1A, SC5D, SOD1
>420
BMPR2, BRAF, CFH, CYBB, DDAH1, HPGD, IL15, MERTK, MMP2, PDPN, PKHD1, PROS1, SYK, TEK, VAV3
>421
adenosine triphosphate, CD28, ICOS, IL15, MERTK
>422
adenosine triphosphate, CASP8, CDH2, CRYM, EGR2, EPHX2, ESRRG, FOXN3, GABRA2, GABRB1, GABRB3, GABRG2, GPR6, GRIK2,
HMGCR, ITGAM, MERTK, NFKB1, PCTP, phosphate, PLOD2, PPARGC1A, SLC6A3, WWTR1, XK
>423
CTSB, EPHX2, PPARGC1A, PXDNL, SIL1, SOD1, SQSTM1
>424
CASR, EPHX2, HMGCR, LDLRAP1, LIPG, SC5D, SOD1
>425
ARHGAP24, CD28, CDH2, GRID2, ITGAM, MMP2, NELL1, TLN2, TNFSF11, VCAM1
>426
AHI1, ERBB3, GABRB3
>427
ADCY8, PDE11A, SLC6A3
>428
ABCA4, ITGAM, ITGAX
>429
NFKB1, SOD1, TMC1
>430
ADH1C, HPGD, HSD17B4
>431
ERBB4, GRID2, PKHD1
>432
ABCA12, BMPR2, CRHR1, FAT4, FUT8, HYAL1, ITGA8, LRRK2, MMP2, PDPN, PDS5B, PPARGC1A, SC5D, SYK, ULK4
>433
ANKRD30A, CCDC178, CFH, CNTLN, DYM, ESRRG, FRAS1, GLRA2, GRM5, KDM6A, KRTAP9-8, SPAG17, TRIM36, ULK4, VAV3
>434
ALOX5, CHRNA7, CYBB, GABRA2, GABRB1, GABRB3, GABRG2, HYOU1, SLC6A3
>435
ADCY8, ADGRB3, ATRX, BRAF, CAPN3, CNTNAP2, ERBB4, FAM184A, FGF14, GABRA2, HCN1, HMCN1, HYOU1, KDM6A, LRRK2,
MERTK, PDPN, PTPRD, RAPGEF2, SLCCA3, SLCO3A1, STAG2, TEK, TRIM5, TUSC3, VAV3, VCAM1, VPS13B
>436
ABCB1, BARX1, CLN3, COL19A1, CYBB, CYP19A1, CYP1A1, ERBB3, FAT4, HYAL1, ICOS, IQGAP2, KRT6B, MERTK, NFKB1, PCTP,
PEX5, PKHD1, PPARGC1A, PPT1, SC5D, TNFSF11, WDPCP, ZFPM2
>437
ICOS, ITGAM, SYK, VCAM1
>438
GABRA2, GABRG2, HTR3B, SLC6A3
>439
ADGRB3, ATRX, BRAF, CAPN3, CNTNAP2, DLEU1, ERBB4, GABRA2, KDM6A, LRRK2, MERTK, MMP2, PDPN, PTPRD, PVT1, RAPGEF2,
SLCO3A1, STAG2, TUSC3, VAV3, VCAM1
>440
BRAF, CHRNA7, DAB1, GRM4, GRM5, LRRK2, PARD3, PRKAG2, RAPGEF2, SOD1, SYK, TNFSF11, WWTR1
>441
ADCY8, CHRNA7, GABRA2, GABRB1, GABRB3, GABRG2, HMGCR, PDE4D, SLC6A3, VCAM1
>442
CDH2, CNTNAP2, CRHR1, CTNND2, CYP19A1, EMB, EPHX2, ERBB4, GRM5, MMP2, NFKB1, OPHN1, PTPN12, PTPN20, RAPGEF2,
RAPSN, ROBO2, SOD1, TEK
>443
ABCB1, GABKA2, GABRB1, GABRB3, GABRG2, SLC6A3
>444
FOXP2, GABRA2, GABRB1, GABRB3, GABRG2
>445
CHRNA7, GABRA2, GABRB1, GABRB3, GABRG2, HMGCR, SLC6A3
>446
ACADS, ACOT7, ADAM23, AGXT, AKAP9, ALDH5A1, ANKRD30A, ATRX, BRAF, CADM2, CUBN, CWC27, CYP1A1, DCC, DNAH14,
EPHX1, ERBB3, ERBB4, FAM122C, GABRA2, GABRB1, GABRB3, GABRG2, HMCN1, HMGCR, HSD17B4, ITGAX, KDM6A,
KRTAP9-4, LRRK2, MAST4, MMP2, NCOA3, PKHD1, PLOD2, PRKAG2, ROBO2, SCG3, STAG2, TEK, UTRN, XK, YTHDC2
>447
ABCB1, ALOX5, BMPR2, CASP8, CD22, CDH13, CFH, CHRNA7, CYBB, CYP19A1, CYP1A1, IL15, ITGAM, NFKB1, RAPGEF2, SOD1,
VCAM1
>448
ABCB1, ACSL4, adenosine triphosphate, AGK, ALOX5, ANK3, ANO3, ARHGAP24, ASIC2, BARX1, BMPR2, BRAF, CASP8, CASR, CD22,
CD28, CD2AP, CDH13, CDH2, CHRNA7, CLN3, CRHR1, CTNND2, CTSB, CWC27, CYBB, CYP19A1, CYP1A1, CYP3A5, DCC, DDAH1,
DDIT4, DISC1, DLD, DOCK4, EGR2, EPHX2, ERBB3, ERBB4,
ESRRG, FAT4, FOXN3, FUT8, GABRA2, GALNT2, GPC5, GPR6, GRID2, GRIK2, GRM4, GRM5, HMGCR, HMGN5, HPGD, HYAL1,
ICOS, IL15, IQGAP2, ITGAM, ITGAX, KDM6A, KLHL3, LBR, LDLRAP1, LIPG, LMNTD1, LMO1, LRRK2, LUZP2, MERTK, MMP2, NCOA3,
NELL1, NFKB1, NPR3, NRG3, OCA2, OSBPL1A, P3H1, PDE4D, PDPN, PDS5B, phosphate, PKHD1, PLOD2, PPARGC1A, PPP2R2B, PPT1,
PRMT6, PROS1, PRPF8, PTPN12, PTPN22, RAB28, RAPGEF2, RAPSN, RIT2, ROBO2, SOD1, SQSTM1, STAG2, STAM, SYK, TEK, TLN2,
TNFSF11, TSC22D1, TUSC3, UTRN, UVRAG, VAV3, VAX1, VCAM1, VPS13B, WWTR1, ZBTB49
>449
GABRA2, GABRB1, GABRB3, GABRG2, PPARGC1A, SLC6A3
>450
CHRNA7, GABRG2, GRID2
>451
ACSS2, adenosine triphosphate, HMGCR
>452
CYBB, ITGAM, NFKB1
>453
GABRA2, GABRB1, GABRB3, GABRG2, TNFSF11
>454
CHRNA7, CNTNAP2, DISC1, ERBB4, GABRB3, GABRG2, OPHN1, PPARGC1A, SLC6A3
>455
adenosine triphosphate, ARHGAP24, BMPR2, CDH13, CDH2, CTSB, CYBB, DDAH1, EPHX2, KDM6A, MERTK, MMP2, NCOA3, PROS1,
RAB28, SMOC2, TEK, VCAM1
>456
ADGRV1, CASP8, DCC, GABRB3, GRID1, GRID2
>457
ADAMTS6, BMPR2, CAPN3, CASP8, DNAH11, DNAI1, ERBB3, ERBB4, ESRRG, FAT4, KDM6A, MMP2, PARD3, PDPN, PPARGC1A,
PTPN12, RAPGEF2, TBC1D32, TEK, UTRN, VCAM1, ZFPM2
>458
AHI1, BMPR2, BRAF, CD22, CD28, CDH10, CNTNAP2, CTNND2, DLEU1, FAT4, HIVEP1, IL15, LRRK2, PDE4D, PLOD2, STAG2, SYK,
SYNE2, TEK, TMC1, TNFSF11, TRHDE
>459
ABCA12, ACADS, ANKRD30A, BRAF, CCDC105, CPNE8, DCC, DDIT4, DISC1, DNAH11, ESRRG, FAM184A, FOXP2, FRAS1, GABRB1,
HIVEP1, HMCN1, KCTD8, NCOA3, PTPRD, RPL11, SH3RF3, TCHH, TENM2, THSD7B, TRHDE, VCAM1
>460
CDH2, CTSB, MERTK, MMP2, SQSTM1, VAV3, VCAM1
>461
ALDH5A1, GABRA2, GABRB1, GABRB3, GABRG2
>462
GABRA2, GABRB1, GABRB3, GABRG2
>463
CD22, CD28, ICOS, IL15
>464
CLN3, RNF19A, SIL1, SOD1
>465
GABRA2, GABRB1, GABRB3, GABRG2
>466
ANKS1B, CASR, CHRNA7, CNTNAP2, GRIK2, GRM5, OPHN1, RAPSN
>467
ADCY8, adenosine triphosphate, ADGRB3, ATRX, BRAF, CAPN3, CASP8, CNTNAP2, ERBB4, FAM184A, FGF14, FOXP2, GABRA2, IICN1,
HMCN1, HYOU1, KCNH8, KDM6A, LRRK2, MERTK, PDPN, PTPRD, RAPGEF2, SLC6A3, SLCO3A1, STAG2, TEK, TRIM5, TUSC3, VAV3,
VCAM1, VPS13B
>468
ERBB3, ERBB4
>469
ERBB3, ERBB4
>470
ERBB3, ERBB4
>471
ADGRV1, SOD1
>472
ADCY8, GRM5
>473
ABCB1, SLC6A3
>474
ABCB1, adenosine triphosphate
>475
ITGAM, ITGAX
>476
ERBB3, ERBB4
>477
ABCB1, CYP3A5
>478
CYP19A1, CYT3A5
>479
ERBB3, ERBB4
>480
ERBB3, ERBB4
>481
ERBB3, ERBB4
>482
ERBB3, ERBB4
>483
ERBB3, ERBB4
>484
ERBB3, ERBB4
>485
ERBB3, ERBB4
>486
ERBB3, ERBB4
>487
ERBB3, ERBB4
>488
ERBB3, ERBB4
>489
ERBB3, ERBB4
>490
ERBB3, ERBB4
>491
ERBB3, ERBB4
>492
ERBB3, ERBB4
>493
ERBB3, ERBB4
>494
ERBB3, ERBB4
>495
ERBB3, ERBB4
>496
ERBB3, ERBB4
>497
ERBB3, ERBB4
>498
ERBB3, ERBB4
>499
ERBB3, ERBB4
>500
ERBB3, ERBB4
>501
ERBB3, ERBB4
>502
ERBB3, ERBB4

LENGTHY TABLES
The patent application contains a lengthy table section. A copy of the table is available in electronic form from the USPTO web site (http://seqdata.uspto.gov/?pageRequest=docDetail&DocID=US20180187190A1). An electronic copy of the table will also be available from the USPTO upon request and payment of the fee set forth in 37 CFR 1.19(b)(3).

The application's sequence listing, which the Patent Office published only in electronic form, follows.

SEQUENCE LISTING (11309 sequences)

SEQ ID NO: 1 - DNA, 252 bp, homo sapiens
tggtggtccagcccgggccgttgcagtgcagccacacggggagggacacggcgcgccgagtgctccgggcggccgcacgttggttccgcccgggccgttccactgcaggcagagggagaggacgacggtgcgcgtagtgcatccccgtggcccgttggttccgccggggccgttccactgaaggcagaaggggggggaccgtggccccaccccccgcggcagcccgttggttccgcccgggcggttccgccc

SEQ ID NO: 2 - DNA, 253 bp, homo sapiens
tggtggtccagcccgggccgctgcagtgcagccacacggggagggacacggcgcgccgagtgctccgggcggccgcacgttggttccgcccgggccgttccactgcaggcagagggagaggacgacggtgcgcgtagtgcatccccgtggcccgttggttccgccggggccgttccactgaaggcagaaggggggggaaccgtggccccaccccccgcggcagcccgttggttccgcccgggctgttccacca

SEQ ID NO: 3 - DNA, 230 bp, homo sapiens
tatgagggtacattcctgtgtgtgtgtgcatgtggcaggtgtgtgtgcatgggtgagcatgtaagcacatgtgtgtgcatggataggtgtgtgggggttgcatatataagggtatatgcctttgtgtgcatagcgtgtggctaactgcataggcatgtaagtgtgtgtgtgtgtgtgtgtgtgtgtgtgtgtgtatgggctgcttatatgggggtgccagcctacgtgtg

SEQ ID NO: 4 - DNA, 81 bp, homo sapiens
aaagactccatctcaaaaacaaaacaaaacaaaacaaaacaaaaaaccactaaaaaaaagactccatttcaaaaacaaaac

SEQ ID NO: 5 - DNA, 115 bp, homo sapiens
tggactttgaggttgaccaggcctgatttttgaataaattcacaaacttacctccatacattatggtagaaaggtcaataatctggactttgaggtcgaccaggcctgatttttg

SEQ ID NO: 6 - DNA, 125 bp, homo sapiens
gaacataaattgtgaagatttcatggacatttattagttccccaaattaatacttctataatttcttaggcctgtcattactgcaatctctgaacataaattgtgaagatttcatggacacttat

SEQ ID NO: 7 - DNA, 81 bp, homo sapiens; identical to SEQ ID NO: 4

SEQ ID NO: 8 - DNA, 115 bp, homo sapiens; identical to SEQ ID NO: 5

SEQ ID NO: 9 - DNA, 125 bp, homo sapiens; identical to SEQ ID NO: 6

SEQ ID NO: 10 - DNA, 81 bp, homo sapiens; identical to SEQ ID NO: 4

SEQ ID NO: 11 - DNA, 79 bp, homo sapiens
ggggaggggacggggccggggcagctcaggtgggcggggaggggacgggcgggggagggggggccggggcagctcaggt

SEQ ID NO: 12 - DNA, 100 bp, homo sapiens
tcagcctcccgagtagctgagactacaggtgcatgctgccatgttgacctccggggcttaagtgatcctcctacctcagcctctcgagtagctgagacta

SEQ ID NO: 13 - DNA, 119 bp, homo sapiens
cgtggtgggaaggggcagaggagggcaggtcccgtggtgggaaggggcgtggtgggaaggggcgccccatggtgggaaggggcgtggtgggaaggggcagaggagggcaggtcccgtgg

SEQ ID NO: 14 - DNA, 94 bp, homo sapiens
gcagctcatcagtgcaaagccgcccggtctggggctctcatgcccccctcactatggcctgtgcccatccgcagcccatcagtgcaaagccgcc

SEQ ID NO: 15 - DNA, 110 bp, homo sapiens
ttagccaggatggtctcgatctcctgacctcgtgattaattttttgtatttttagtagagacggggtttcactgtattagccagggtggtctcgatctcctgacctcgtg

SEQ ID NO: 16 - DNA, 77 bp, homo sapiens
tgtgtgggtgaaacctgcagggcggaggctgttgccccatgtgtggttggctggtgtgtgggtgaaacctgcagggc

SEQ ID NO: 17 - DNA, 102 bp, homo sapiens
cgttggttccgcccgggccgttctactccaggcagacgggaggagaaacacggcgcgctcagcgtcccctcccccgttggttctgctcgggcccttccactg

SEQ ID NO: 18 - DNA, 102 bp, homo sapiens
cgttggttccgcccgagccgttctactccaggcagacgggaggagaaacacggcgcgctcagcgtcccctgccccgttggttctgctcgggcccttccactg

SEQ ID NO: 19 - DNA, 100 bp, homo sapiens
aaaaaaaaagagggaggaagagtccccacaaaccagcctgtgggcaacagagcaagactctgtctcaaaaaaaaagagggaggaagagtccccacaaacc

SEQ ID NO: 20 - DNA, 75 bp, homo sapiens
ccgtgttaggataaatcttgacacgcactaacttggtggtaccacacccggccagtgttaggataaatcttgaca

SEQ ID NO: 21 - DNA, 106 bp, homo sapiens
ggcttccagtgagaagtggggctgaatagaggtttggcagtgcttagcatagggggcgagagtctcggcttccagcgagaagtggggctgaatagaggtttggcag

SEQ ID NO: 22 - DNA, 99 bp, homo sapiens
cagcccatgcaccccggaaggcacgcctcgcacccagctgtagagccccatgttgtgtgcacccccagcccatgcaccccggaaggcacgcctcgcacc

SEQ ID NO: 23 - DNA, 106 bp, homo sapiens
gggaaacagagactcctctggtaccagggtcccctgaatctccggagtcccccaagtccattgagtccactgggcccgaagagggaaacagagactcctctggtac

SEQ ID NO: 24 - DNA, 112 bp, homo sapiens
tgtggaaagacagcagctgtggggtccctgtcctggccggccactcctccttcccgccagtgccggagaccctcggaagtgtatgtggaaggacagcagctgtggggtccct

SEQ ID NO: 25 - DNA, 82 bp, homo sapiens
ggcaccttcgctaagcttcctccaccagcgggacctggttctgggtgggctgggtctgggcaccttcgctaagcttcctcca

SEQ ID NO: 26 - DNA, 93 bp, homo sapiens
tgtggggcagtgccagccgcctcaccactgtgcaggatgaggaggaggtgtgtgtgaagggggttgtggggcagtgccagccgcctcgccact

SEQ ID NO: 27 - DNA, 82 bp, homo sapiens
caaactttcccacattttcctgtcttctgagccctccaagtctctaggaggtttcaaactttcccacattttcctgtcttct

SEQ ID NO: 28 - DNA, 84 bp, homo sapiens
tctgtgttctagccagcccagggcacgtactgcctggaggatgagggatggtccaggctcatctgtgttccagccagcccaggg

SEQ ID NO: 29 - DNA, 100 bp, homo sapiens
cctgggtctcgtctgccgcggattgctctttgtgctccccagagcgaggtgcagatgccagggaccctctccctgggtctcgtctgctgcggattgctct

SEQ ID NO: 30 - DNA, 100 bp, homo sapiens
atgcatgctcatgctgtgtgtgtgtacatgcacgcgtgtgtgcgtgtgcgtgtgtgcatgtgtacatgcatgtgtgtgtgcatgctcatgctgtgtgtgt

SEQ ID NO: 31 - DNA, 114 bp, homo sapiens
ccgtgcccggtaaatagtgactctgcgtccctcctcccgagtcccgggactttctcatcacccgccacagaaactccgtgcccggtaaatagtgactctgcctccctcctcccg

SEQ ID NO: 32 - DNA, 158 bp, homo sapiens
tatgagggtgcgtgcacatgtgtgtgtgtgggtgggtgggtgtgagtgaatgtgtgtgcacatgcatatatgagctgcatctataagggtacatgtccatgtgtgtacgtgggtgggtatatgggggctgcatatataagggtacatgcccatgtgtg

SEQ ID NO: 33 - DNA, 98 bp, homo sapiens
tgtccacacgaggagcacagcctggagcacattgcgttgttggtgtcacggagccactggcctcaactgcatgtccacacgaggagcacggcctggag

SEQ ID NO: 34 - DNA, 89 bp, homo sapiens
ggagagtgcatgcccagcatctgagggtcagccagcaccaggcccgaaatggctaggaacccgggagagtgcatgccgagcatctgagg

SEQ ID NO: 35 - DNA, 98 bp, homo sapiens
gggctcctggtgagtgtgccccctgtgcctcacatgggctcctggcgagtgtgcccccccggcgcctcctcacatgggctcctggcgagtgtgccccc

SEQ ID NO: 36 - DNA, 131 bp, homo sapiens
ctggggagacccagcacctctgcagaacccctcctcagcctggtccccagcggaacgtggagtgggcaggagtgtcacccagctcagaacgctggggagacccagcacctctgcagaacccctcctcagcc

SEQ ID NO: 37 - DNA, 203 bp, homo sapiens
cctgcactcgtgtgcacactctccccctcacctttccttgcctggccagcccccgagggcggcttggtctccccgcgcctgcactcgtgtgcacactctccccctcacctttccttgcctggccagcccccgaaggtggcttggtctccccgcacctgcactcatgtgcacactctccccctcacctttccttgcctggccag

SEQ ID NO: 38 - DNA, 101 bp, homo sapiens
ggatcgtaacagaccacaggcctcacacacttgttccggcccaagcatcccccaggccaaacctagacacagtggatcataacagaccacaggcctcacac

SEQ ID NO: 39 - DNA, 85 bp, homo sapiens
aaatgacaaatgagagccatgagctgatgcaacaggggggggagagatgaatggaggcgcaaaatgacaaatgagagccgtgagc

SEQ ID NO: 40 - DNA, 107 bp, homo sapiens
gattctcctgcctcagcctcctgagtagctgagactacaggtatgtgccactatgctcagccttccaggttcaagtgattctcctgcctcagcctcccgagtagctg

SEQ ID NO: 41 - DNA, 98 bp, homo sapiens
ttgccggtgaggttgaggctctgcaggcgcggggcgcagcgcgccaggtcggctggcagctcgcgcagccggttgccgctgaggttgaggctctgcag

SEQ ID NO: 42 - DNA, 93 bp, homo sapiens
tccactgcgtgtacataccacgccatctattcactccactgcgtgtacataccccactctgtccattcactccactgcgtgtacatgccacgc

SEQ ID NO: 43 - DNA, 75 bp, homo sapiens
ggccgaagccacctccacaccacggtttcctgggttccccaaaaccaggcttggccgaagccacctccacaccac

SEQ ID NO: 44 - DNA, 90 bp, homo sapiens
gggctcttgggactgctctactggcctgagtggcagggtcctgtgtgagtgtggcagaggccatgggctcttgggactgctctaccggcc

SEQ ID NO: 45 - DNA, 106 bp, homo sapiens
atgttgaattgtagctcccataattcccatgcgttgtggggtttggcggtgtccccacccaaatctcatgttgaattctagctcccataattcccatgcgttgtgg

SEQ ID NO: 46 - DNA, 90 bp, homo sapiens
gacgggccccgctgaggctagaggtccccccctcacagtggacatgccgaccacccttgaacttgcgacaggccccgctgaggctagagg

SEQ ID NO: 47 - DNA, 103 bp, homo sapiens
gtgtcctgagaaggggggtgggatgacagggagggacgtgtccttgtgggggaatgggatgggatggcagggagggacgtgtcctgggaaggggggtgggatg

SEQ ID NO: 48 - DNA, 120 bp, homo sapiens
agtgggttctctaggagcagggctggaggtgaggtgtgctgggatgggcacagttacagacagagcagtgccctctgccaggctgggatgagtgggttccctaggagcagggctggaggt

SEQ ID NO: 49 - DNA, 99 bp, homo sapiens
tggggtggagcttccatgccttctacagcaccttgccacctcccagaactggcacacagggcaaaatatggtgggtggggtggagcttccatggcttct

SEQ ID NO: 50 - DNA, 60 bp, homo sapiens
caaccccttctctgcttttctggagggcaagaaccctccaccccttctctgtgtctctac

SEQ ID NO: 51 - DNA, 96 bp, homo sapiens
gcatggccccagcatgggcctgtgatccaatgatgggttctgtgggccagtcattccaggtaatctgtgtgcatggccccagcatgggcctgtgat

SEQ ID NO: 52 - DNA, 140 bp, homo sapiens
ggggaggtggttgttgaggggatgggagggtgggggctctaagagtggggaagttgagggagtggggaagtggttgttgggagaaatgagggagaagtgtggggaggtggttgttgagggggtgggagggtgggggctct

SEQ ID NO: 53 - DNA, 82 bp, homo sapiens
caggataaagcgtgtctcaggataaagggtgtctcagggtaaagggtgtctcaggataaaggggtgtctcaggataaagggt

SEQ ID NO: 54 - DNA, 93 bp, homo sapiens
ttaagagatgacagggtgattgatggtacacttgggaagaatgtgtactctagctttcttgggagtagcgttaagagatgacaaggtgattga

SEQ ID NO: 55 - DNA, 111 bp, homo sapiens
tgtgtgcattgcatgtgtgcctgtattgtgcatgtgtgtgtgtgcgtgtgggtgtgtgtgcatatgtgtgcgtgtatgtgtgcattgcatgtgtgcctgtatgtgtgcatg

SEQ ID NO: 56 - DNA, 84 bp, homo sapiens
tatgcctcccctccctcctttggtgccccccaagttaccccgaccaggccgtccttatgcctcccctccctcccttggtgcccc

SEQ ID NO: 57 - DNA, 88 bp, homo sapiens
ggtggggtcgccatggggccagtgcccctggggagaacctgccccagctggccgtaggtaacagggtggggttgccatggggccagtg

SEQ ID NO: 58 - DNA, 107 bp, homo sapiens
cagcatatctgccccatgttctggggtattccaaggggatgttgagccaggatcccctccccctcagcccatcagcatatctgtcccatgttctggggtattccaag

SEQ ID NO: 59 - DNA, 93 bp, homo sapiens
tgaactcccccctcccctaagcagacctagaaccctgaactaccccctccgctaagcaaacctggaaccctgaactccccccacccctagcca

SEQ ID NO: 60 - DNA, 86 bp, homo sapiens
accccatctccactaaaaatacaaaaaaaaaggccaggcgcggtagctcacgcctgagaccccatctctactaaaaatacaaaaaa

SEQ ID NO: 61 - DNA, 101 bp, homo sapiens
gctgggattacaggcgtgtgccaccacatctcaaactcctgacctcaggtgatccgcccacctaggcctccaaaagtgctgggattacaggcgtgagccac

SEQ ID NO: 62 - DNA, 98 bp, homo sapiens
ggggaacatctgccttggcagagggcctgcaggtggtgagaaaaggaggggatggagaaaaacaaagcgaggggaacatctgccttggcggagggcct

SEQ ID NO: 63 - DNA, 105 bp, homo sapiens
gaaggcaaaggggaagcaggcatgtcctgcatggctgaggaggcctcaggaaacttacaatcatggcagaaggcgaaggggaagcaggcatgtcctgcatggctg

SEQ ID NO: 64 - DNA, 152 bp, homo sapiens
gttgtattggtcaggctaggttaggccatgtgctggtaataaacaagccctttccttcttcttcttcttcttcatcatcatcaccactgatatttttacatgttgtattggtcaggctaggttaggccacgtgctggtaataaacaagccct

SEQ ID NO: 65 - DNA, 115 bp, homo sapiens
gacatgtcattcccctcgaatgaaagttcccaggcaggaagtgagttttaccttatcatgtggatgtgtggatcttatcaggttagacatgtcattcccctagaatgaaagttcc

SEQ ID NO: 66 - DNA, 142 bp, homo sapiens
ctcaggtgatctgcttgcctcagatccccaaagtgctggggttacaggcccagctaatttttatattttcaggctggtctcaaactcctgatctcaggtgatctgcttgcctcagatccccaaagtgctgggattacaggcc

SEQ ID NO: 67 - DNA, 90 bp, homo sapiens
ggcctcctaaagtgctgggattacaggcatgagctcctgacctcaggcgatccgcccaccttggcctcccaaagtgctgggattacaggc

SEQ ID NO: 68 - DNA, 80 bp, homo sapiens
tgatccagcttgttctggaagggactgcagtctccccgggacttagctttggagaatgagccagcttgttctggaaggga

SEQ ID NO: 69 - DNA, 108 bp, homo sapiens
agctagatacagagtgtcgattggtgcattcacaaaccctgggctaaacaaagggtgctgattggtgtatttacaaaccttgagctagatacagagtgccgattggtg

SEQ ID NO: 70 - DNA, 80 bp, homo sapiens
ggcaggccgagccctgtgtgtataccatgttcttcacctatcctgggcaggggcggcaggccgagccctgtgtatatacc

SEQ ID NO: 71 - DNA, 115 bp, homo sapiens
cgggatgcacccactgactgaagcccaccccactctagaaacactctgcacaagggggagagcctctgtaacgtcctgcgggatgcacccaccgactgaagcccaccccactcta

SEQ ID NO: 72 - DNA, 80 bp, homo sapiens
ccctgcccttcccacctccctgcccctcccacctccctgccccttcccacctccctgccccttcccacctccctgcccct

SEQ ID NO: 73 - DNA, 93 bp, homo sapiens
ggcagggaaggctgttcatttcaggacgacgtccacagcttctatttcacggagccatctcagaggcagggaaggctgtccatttcaggacga

SEQ ID NO: 74 - DNA, 77 bp, homo sapiens
ccctgcaaaagtcctcggcctgcccagctcatgataacatcagcacacggggaccctgcagaagtcctcggcctgcc

SEQ ID NO: 75 - DNA, 161 bp, homo sapiens
ggcttattggctggcatgcctgggtcatgtgcccatactaaactaatcacagtggtgaggaacatggagtactctgattggcctgcttgggtcatgtggcaatcctgagccaattatattgatgggaagaagtattctgattggcctgcttgggtcatgtg

SEQ ID NO: 76 - DNA, 82 bp, homo sapiens
cacagagccagggaggaagtcctaccccctctgccggctaccgggggggctggagccacacagagccagggaggaagtccag

SEQ ID NO: 77 - DNA, 133 bp, homo sapiens
ccccccagggtcacgccctggcccagccactcctcctaggtgtgggatgccagacatcaggcctaaaacctctctttaccttttaccccccagggtcacgccctggcccagccactcctcctaggtatgggat

SEQ ID NO: 78 - DNA, 116 bp, homo sapiens
gttctagatgtaaaactttccctttaacctacacatgatatagcctgttctaggtgtaaaactttaacctacacatgatgtagcccgttctagatgtaaaactttcctttaacctt

SEQ ID NO: 79 - DNA, 120 bp, homo sapiens
agaattttttttggcattttattgatatttcagttaaccttatgaattgaggtagtgtaaattataactcttagtaaatgtaggtagtagaattttttttgacattttattgatatttca

SEQ ID NO: 80 - DNA, 97 bp, homo sapiens
tccctgtagcaggaggatgacctgctgctctccccatcctaccctggccctgggccagcaccccaccctcagcctccctgtagcagggggatgacct

SEQ ID NO: 81 - DNA, 1254 bp, homo sapiens
ctgtgtatacagccacccatccatctatctgtccatccgtccactctcccgttcaccagtccatccatctatccaccacacttcatccatccatccctccctcgtctacccaactccatccatccatccatccatccatccatccatccctccctccctcatctaccctactccatccatccatgcatccatccatccacttacccaccccactccatccatccatccactcacctacttctccacccatccatccatctatccatccctcacctaccccactgtacccactgtacccactcacctacccaactccatccactcatccactcacctaccccattccattaatctgtccactcacctatcccactccatccatccatccatgcattcatccacacacctaccctactccatccatccactcacccaccccactccatccatccatccactcacctgcttctccacccatccatccatctatccatccctcacctaccccactgtacccactcacctacccaactccatctacccatcccctcacttaccccattccattagtctatccactcacctaccctactccattcatccatccatccatccatccatccatccacccacccatccattcctcacccaccccaccccatccatccatccatccatccactcacctacttatccatccatccatccatccatccatccactcacctacttatccatccatccatccacccatccactcacctacttatccatccatccatccatccatccatccacccatccatccctcacccaccccactccatccacccatccatccacccatccatccactcacctacttatccatccatccatccatccatccatccatccatccatccatccctccctcacataccccactccatccatccatccattcatctgtccatccatccatccacccattcatccactcacctaccctactccatccattcatgcatccatccatgcactcacccactccactccatctgtccatccatccatgcatccatccatccccccacccatccctcatctaccctactccatctatccaaccatccactcacctactccacttcatccatccatgcattcatgcatccatccatccatttactcacctgcccaattccattcatctatccattcatccacccacccacccacccacccatcagccccactgcacccatccatcca

SEQ ID NO: 82 - DNA, 69 bp, homo sapiens
gaatgagtcagggtggagcaggtaatcagaatgaatgaggtaattggaatcagtcagggcagagcaggt

SEQ ID NO: 83 - DNA, 110 bp, homo sapiens
ctggtttcataatttcaggtcttagccttacacaaaatatgtttgccccagtcaatgttttggagtattttttcaagtttttcttctggcttcataatttcaggtcttag

SEQ ID NO: 84 - DNA, 109 bp, homo sapiens
tatgtaagtgtttatagagaataaatattgtgatttatatataattttatacatattgaatacatatttttacataaatttatgtacataattttatacatattgaata

SEQ ID NO: 85 - DNA, 157 bp, homo sapiens
ttggcactctgtatctagctcaaggtttgtaaacacaccaatcagcaccctgtgtctagctcagggtttgtgaatgcaccaatccacactctgtatctagctactctggtggggacttggagaacctttgtgtccacactctgtatctagctaatct

SEQ ID NO: 86 - DNA, 90 bp, homo sapiens
ggatctgagctgggccccaggatctgagctggaccccgggatcatgagctgggccccgggatctgagctgggccccgggatctgagctgg

SEQ ID NO: 87 - DNA, 108 bp, homo sapiens
aggcaacaaagatcagggcaggttccaggaaccattaccctcgggcaacaaggttcagggcagatttgcagaaccgttagattcaggcaacaaagatcagggcaggat

SEQ ID NO: 88 - DNA, 92 bp, homo sapiens
gctaatttttgtatttttagtagagacaaatagctgggattacaggcacccgccaccacgcccggctaatttttgtatttttggtagagaca

SEQ ID NO: 89 - DNA, 122 bp, homo sapiens
ccctcacacttttgtcctgaaacacctctgggaagaaggaaggagggaaggaaggagggagggtagggagggaaacatttacctgtcaccctcacacttttgtcctgaaacacctctgggaa

SEQ ID NO: 90 - DNA, 100 bp, homo sapiens
aaaagaaaatggccaattccttgacgattttcggttttggtaaaataaaaaataaaaataaaaacaaaaacaaaaagaaaagaaaatggccaattccctg

SEQ ID NO: 91 - DNA, 129 bp, homo sapiens
ggcctgctgccttcccagtgctgcttccatttccccattccttcagcccagaccacattgtcagaagccaaacaaggagccaggcctgctgccttcccagtgctgcttccacttccccattccttcagc

SEQ ID NO: 92 - DNA, 86 bp, homo sapiens
ctgacccgctcccaagacaggccttccccttggcagtgctccagtcccaccacagactgacccgctcccaagacgggccttcccct

SEQ ID NO: 93 - DNA, 113 bp, homo sapiens
gaggagcgtgtgtgtgcatgtgtgtgtgtgcgtgtgtgcatgtgtgcatatgtgtgtgtatgtttgtgtgtgcatgtgtgcgcgtgggtgtgtgcattgtgtgcatgtgtgtg

SEQ ID NO: 94 - DNA, 96 bp, homo sapiens
gggatcagaccctgatgacaggggcagccagagatgagagagatccaatgtccagggagggacatgccagggggatcagaccctgatgataggggc

SEQ ID NO: 95 - DNA, 117 bp, homo sapiens
agaggcatgagcttgtctggacaacagaagctcaatctcagcatcctaaaggcctacctctgggaaggggggggtcacagaggcatgaacttgtctggacaacagaagctcaatctc

SEQ ID NO: 96 - DNA, 123 bp, homo sapiens
tttgtaacttcacttcaacctctgattggttgttgtctgcaaccaatcagactgattgctggccaagtcttcgtgtgcatagaagtgcaactttgtaacttcactttaacctctgattggttg

SEQ ID NO: 97 - DNA, 71 bp, homo sapiens
ccagttgttaaactttggccaacacagcacagctgggcttctaagattccagttgttaaactttggccaac

SEQ ID NO: 98 - DNA, 96 bp, homo sapiens
cgcgcctgtagtcccagctactccgtctctactaaaaatacaaaaatacaaaagttagccgtgcgtgatggtgcgcgcctgtaatcccagctactc

SEQ ID NO: 99 - DNA, 188 bp, homo sapiens
actacttatcatcatcaccacatctgtcatcatcatcatcatcgtcaccatttcatcttcatctccatcactggcatcatcttctttatcatcgttactgccatcatcactggcttccttgtggttggcaacatcatcatcgccatttcatcttcatctccatcaccggcatcatcttctttatcatc

SEQ ID NO: 100 - DNA, 127 bp, homo sapiens
gccaggctggtctagaacttctgacctcaggtgatccacccacctcagcctccaaaagtgctgggattacgggagtgagccactgtgccccgccaggctggtctagaacttctgacctcaagtgatc

SEQ ID NO: 101 - DNA, 76 bp, homo sapiens
ctctgtcgcccaggctggagtgctttattttatttttttgagacagagtctcgctctgtcgcccaggctggagtgc

SEQ ID NO: 102 - DNA, 133 bp, homo sapiens
gggaagtgataaatgtccatgaaatcttcacaatttatgttcagagattgcagtaaagacaggagtaagaaattataaaactattaattttgggaactgataaatgtccatgaaatcttcacaatttatgttc

SEQ ID NO: 103 - DNA, 98 bp, homo sapiens
attcagagttgctgctggacaagggttgtcccagaggccagctgtggacagaaccttcaggaatgttcttggaattcagagttgctactggacaaggg

SEQ ID NO: 104 - DNA, 144 bp, homo sapiens
gcagccagaacactggagggggacccacaccctctctccctgggctgtggatgggtgttgcaagtcccatccctcctggcctgcacctggaacagcagccagaacaccggagggggacccacaccctctctccctgggctgtgg

SEQ ID NO: 105 - DNA, 183 bp, homo sapiens
tcacacgctcaagaagctggccctgacccttatgagtgttgggccctgtgaaacttcacaggtcacacactcaagaagctggcccattcagagttgctgctggacaagggttgtcccagaggccagctgtggacagaaccttcaggaatgttcttggaattcagagttgctactggacaaggg

SEQ ID NO: 106 - DNA, 144 bp, homo sapiens; identical to SEQ ID NO: 104

SEQ ID NO: 107 - DNA, 85 bp, homo sapiens
tcacacgctcaagaagctggccctgacccttatgagtgttgggccctgtgaaacttcacaggtcacacactcaagaagctggccc

SEQ ID NO: 108 - DNA, 94 bp, homo sapiens
caggcctcctctctgctgagagctgcagagacaatgggacaacctggctgacgagaggagccacccactctagggcctcctctctgccgagagt

SEQ ID NO: 109 - DNA, 135 bp, homo sapiens
atcatggccaaccaggttctatgtaatctgtctacacacacacccaccacccacccacacacacacacacacacacacacacacacaatcatggtcaaccaggttctatgtaatctgtctacacacacacccacc

SEQ ID NO: 110 - DNA, 73 bp, homo sapiens
ttacctattatgtgcaggtcctgctcatttaatattttaatatttgttgattacctattatgtgcaggtcctg

SEQ ID NO: 111 - DNA, 131 bp, homo sapiens
taattgtaccattaactattctctcaatagataatagtgatttgtactattatctattctcttatagattgtacttttatctattctctatctcttatagatttgtactattatctattctcttatagatt

SEQ ID NO: 112 - DNA, 87 bp, homo sapiens
gatcaagttgaggtcagtcatattgggttagcataggaatggggtcatgccggtgtgatcaagttgaggtcggtcatattgggttag

SEQ ID NO: 113 - DNA, 163 bp, homo sapiens
gccctggagagggtagctcctctctgcttgctggttgactagacgtctgctgctctcagcaaagaggaggccctggagagggtaactcctctctgcgggcaggtcatttggcggtctctgcaggtctctgaagttctcagcagagagggtagctcctctctgt

SEQ ID NO: 114 - DNA, 101 bp, homo sapiens
gcaccaggacagggactggccaaactgcagccacctgggcaccaggacagggactggccaaaccgtggccacctgggcaccaggacagggactggccaaac

SEQ ID NO: 115 - DNA, 113 bp, homo sapiens
taattccagcactttgggaggccgaggtaagaggattgcttgcggccaagggttctaaaccaaccaggcgtggtggctcactcctgtaatcccagcactttgggaggccgagg

SEQ ID NO: 116 - DNA, 77 bp, homo sapiens
cagctaatttttgtatttttagtaaagacggggtttctatccactaccacgcccagctaatttttgtatttttagta

SEQ ID NO: 117 - DNA, 97 bp, homo sapiens
tcccaagtagctgggattacaggcacccgccaccatacccagctaatttttgtatttttagtagagacagggtttcccaagtagctgggactacagg

SEQ ID NO: 118 - DNA, 119 bp, homo sapiens
taccaatttctgtggcatgccaggtaatatatgactattaatgacataatatgcatattatgcatattaggctttctggaagccagtaccaatttctgcggcatgccaggtaatatatg

SEQ ID NO: 119 - DNA, 88 bp, homo sapiens
aagtcactgtcaggctctgggctagatctcatttagtcagttggttggtatgtatagaagtcactgtcaggctctgggctagatctca

SEQ ID NO: 120 - DNA, 105 bp, homo sapiens
ggattgtatatgcaccaatcagcactctgtctagcttggggtttgtggatgcaccaatcagcactctgtgtctagctcagggattgtaaatgcaccaatcagcac

SEQ ID NO: 121 - DNA, 108 bp, homo sapiens
caccaatggacactctgtatctagctcaaggtttgtaaacacaccaatcagaaccgtgtgtctagctcagggtttgtgaatgcaccaatggacactctgtatctagct

SEQ ID NO: 122 - DNA, 93 bp, homo sapiens
aaaaatcctaagtaaaatactagaaaaccaaccccaatctcactcatgaacatagatgcaaaaattctaagtaaaatactagaaaaccaaccc

SEQ ID NO: 123 - DNA, 92 bp, homo sapiens
cctgtagtcccagctacttgggaggctgagactggacaaaaattagcaaggtgtggtggtacgcacctgtagtcccagctacttgggaggct

SEQ ID NO: 124 - DNA, 86 bp, homo sapiens
tgcgctcagccacctccacgcatttcatacccaacgtgaccagctggtcccttgacacgtgcgctcagccacctccatgcatttca

SEQ ID NO: 125 - DNA, 100 bp, homo sapiens
tgaggctgcagtgagcagagatcacaccactgagactcgggaggctgaggcagaagaatcgcttgaaccctggaggcggaggctgcagtgagcagagatc

SEQ ID NO: 126 - DNA, 103 bp, homo sapiens
ctcccaaagtgttgggattacaggtgtgagccactgcgccacaccttttcctggttttaaatgatcctctcaccttggtctcccaaagtgctgggattacagg

SEQ ID NO: 127 - DNA, 156 bp, homo sapiens
gtgtgtgtgtgtgtcagggtcttgctctgttgtcccagctggagcacagtggctgtaagaagggagagagatgaaccgtgtgtgtgtgtgtgtgtgtgtgtgtgtgtgtgtgtgtgtcagggtcttgctctgttgtcccagctggagcacagtggc

SEQ ID NO: 128 - DNA, 122 bp, homo sapiens
cctcccaaagtgctgggattacaggcgtgagccaccgtgcccggccagtttcgaacttttgacctcaaatgattcacccaccttgacctcccaaagtgctgggattacaggtgtgagccacc

SEQ ID NO: 129 - DNA, 90 bp, homo sapiens
tcagaatcggaggtagcaaggcttgattttttttttttttttaagcatctcacttttcggccagtctcagaatcggaggcagcaaggctt

SEQ ID NO: 130 - DNA, 104 bp, homo sapiens
tgtaatccaagcactttgggaggctgaggcaggcagatcaagaggtcaagaaatcgaggccaggcacagtggctcacacttgtaatcccagcactttgggaggc

SEQ ID NO: 131 - DNA, 95 bp, homo sapiens
cagctgggttacctgtacaggtgagtgcttcgccccgggaggggaggagtgtcggagcccagcacctccgtcagctgggtcacctgtacaggtga

SEQ ID NO: 132 - DNA, 106 bp, homo sapiens
acctttttgggacaattagtaaaacctgaatggggtctgatgattatatagtaacaatgtatccagagaggccctgagaaagacttttttgggacaattagtaaaa

SEQ ID NO: 133 - DNA, 105 bp, homo sapiens
aacctgggaggcggaggttgcagtgagccaagattacgccattgcatctactcgggaggctgaggtaagagaattgcttcaacccgggaggcggaggttgcagtg

SEQ ID NO: 134 - DNA, 95 bp, homo sapiens
ctgggagagggaggaggaagggaagaagagaggccatgagcaagggtggtggggctgtgagggtggtggggctgggagagggtggaggaagggaa

SEQ ID NO: 135 - DNA, 149 bp, homo sapiens
agaaactatcctctctgctgagagctggacacttcttgggatgacctgcttagcagaaaggagctaccctctctgctgagagctgaagaaatgatgagatgactagctgcaaagagaaagaggagctaccctctctgctgagagctgaa

SEQ ID NO: 136 - DNA, 108 bp, homo sapiens
ctgcagagaggagctacccactccagggcctcctctctcctgagagctgcagagaatgacaggacgacctgcctgcagagaggagctacccactccagggcatcctct

SEQ ID NO: 137 - DNA, 93 bp, homo sapiens
atggctgcaaagccagctctctcttcgtggcccgccaggactcgacctcaagtctcctgcatggcggcaaagccagctctctcttcgtggccc

SEQ ID NO: 138 - DNA, 113 bp, homo sapiens
aagagatctcactctaggataagtaaatagcaagcatttttgccaaatacttagaatttacatacccaataactcagaagagatctcactctaggataagtaaatagcaagca

SEQ ID NO: 139 - DNA, 86 bp, homo sapiens
tcacttgagctcagggatttgaggctgcagctatttgagaggctgaggtgggaaggtcacttgagctcaggaatttgaggctgcag

SEQ ID NO: 140 - DNA, 84 bp, homo sapiens
tgtgtgactcagggaccagtctatgagcctgcctgtgcctttgagccgatacctgtgtgtgactcagggacgagtctatgagcc

SEQ ID NO: 141 - DNA, 83 bp, homo sapiens
ccgctgctgccgccctcggccacgggtcccgacgcgacagtgggcgggccagcgccgaccccgctgctgcccccctcggccac

SEQ ID NO: 142 - DNA, 123 bp, homo sapiens
actaaggaatacttcaccgccccccacggctttctttccctagtcctgactaaggaatgctttaccgcccctgcactttctctctccttggtatgtcctaaccaaggaatgctttaccgcccc

SEQ ID NO: 143 - DNA, 104 bp, homo sapiens
gcaacagaacagctctcaggagacctgaagtgggtagctcctttccacagggcagagaggagcttcactctgcaacagaacagctctcaggagacccgaagtgg

SEQ ID NO: 144 - DNA, 72 bp, homo sapiens
actatattggccaggctggtcactatattggtttcactctattggtttcactatattggccaggctggtctc

SEQ ID NO: 145 - DNA, 92 bp, homo sapiens
ttcaaggctgcagccaggtatgattgtgccactgtggttgaggtggaaggattgcatgagcccaggagttcaaggctacagccaggtatgat

SEQ ID NO: 146 - DNA, 108 bp, Homo sapiens
gttccacgtggcagcctgatctaggtccaggcttgggagaggaggatgaggggtgcttactaagtgcatggccgcgttccacgtggcagcctgatctaggtccaggct

SEQ ID NO: 147 - DNA, 511 bp, Homo sapiens
ctcacctcccggacgggacggctggccgggcagggggccgaccccccccacctccctcccggacggggcggctggccgggcagaggggctcctcacttcccagtaggggcggccgggcagaggcgtccctcacctcccggacggggcggctggccgggcggggggctgaccccccacctccctcccggacggggcggctggccgggcagggggctgaccccccaacctccctcccagacggggcggctggcctggcggggggctgacccccccatctccctcccggatggggcggctggcctggcgggggctgacccccacctccctcccggacagggcggctgctgggcggagacgctcctcacttcccagacggggtggctgccgggcggaggggctcctcacttctcagacggggcggctgccgggcggaggggctcctcacttctcagacggggcggttgccaggcggagggtctcctcccttctcagatggggcggctgggcagag

SEQ ID NO: 148 - DNA, 79 bp, Homo sapiens
ccagatgtcaactcagagggtcataaagggttacagttagggttacatctgagccccagatgtcaactcagggggtcat

SEQ ID NO: 149 - DNA, 97 bp, Homo sapiens
aagcaacagcctgggttccagagttgaacaccgcactcataagactatagaggattcaccaccagactgagaagcaacagcctgggctccagagttg

SEQ ID NO: 150 - DNA, 75 bp, homo sapiens
cactgcagcttgcaagccacccatgcctggccaaagggatggggcatcagggcactgcagcttgtaagccaccca

SEQ ID NO: 151 - DNA, 126 bp, homo sapiens
tgaaacacagtggacatgtctaaattatgtataatttgaagagacctataattgcaagagatctataagagataacgatgaaagagacacatgaaacacatggacatgtctaaattatgtataatt

SEQ ID NO: 152 - DNA, 106 bp, homo sapiens
cacctcccagacggggtggcggccgggcagagaggctcctcacttcccagacagggcggccaggcagaggcgcccccccacctcccagacggggcggcggccgggc

SEQ ID NO: 153 - DNA, 79 bp, homo sapiens
ctacttcatatattgtctcaaatatatgaatggaaccaacaatatatgatgttcctacttcatatattgtctcaaaatt

SEQ ID NO: 154 - DNA, 112 bp, homo sapiens
gttttaattttcatagaacctcctcccacccattataaaggtctacctatttcctctctggtgttactttatctcccccagagttttaattttcatagagcctcctcccacc

SEQ ID NO: 155 - DNA, 117 bp, homo sapiens
gaacagtagtaagagctggcaagaccaagctggcaagacctaacagtagtaagagctggcaagatctggaattggaggggctggtgggtaaggagaacagtagtaagagctggcaag

SEQ ID NO: 156 - DNA, 93 bp, homo sapiens
ggttggggtacttgcccttcccccagaaaagcagagaagggatagagacacggagagaaggggttggggtacttgcccctcccccagaaaagc

SEQ ID NO: 157 - DNA, 78 bp, homo sapiens
ttcaaaaaacctacagctaacatcagacttatagctgacttacagacttgttgctttcaaaaaacctacagctaacat

SEQ ID NO: 158 - DNA, 85 bp, homo sapiens
agagaaggggaatggggcaaaccaccccgttcagagagagagagagagaaagagaaagagaagggggatggggcaaaccaccccg

SEQ ID NO: 159 - DNA, 113 bp, homo sapiens
tggttatagtaaggggactaagtggttatagtaaggggacattggctgagtatgaggacattggttatatgaggggacattggttatagtaaggggacattggctgagtatga

SEQ ID NO: 160 - DNA, 70 bp, homo sapiens
tgggagtacttgggtaggatatctactgctctcaaccaatggctgctgggagtaccagggtaggatagta

SEQ ID NO: 161 - DNA, 115 bp, homo sapiens
ttgaatcaccaatgactttccagtggccattccccatctcccttcccgggtatcctcccagtttctctgcaatatttgacactggtttgaatcaccaatgacttcccagtggcca

SEQ ID NO: 162 - DNA, 142 bp, homo sapiens
attcatccttatagtcacacaagtgatcacatgacccaggtccatccaaccagggactttccctgagaatttttatttggaacaaacagagaaaagccattcacccttatagtcacacaagtgatcacatgacccaggtcca

SEQ ID NO: 163 - DNA, 90 bp, homo sapiens
gtggtccattgagtatgaaccaaacagggaagattagatgttccgttccaaggtggattccaacagtggtccattgagtgtgaaccaaac

SEQ ID NO: 164 - DNA, 116 bp, homo sapiens
ccagctaatattttatttttactagagatgaggtctctattaaaaaaaatatttttattagaaaataccaccaccacacccagctaatattttatttttactagaaatgaggtctc

SEQ ID NO: 165 - DNA, 105 bp, homo sapiens
tgtccagagtaggacagagcagacacacaagtgcaatccaccaaggaagtgctgtgatggggatgatttggagacacgctgtccagaggaggacagagcagacac

SEQ ID NO: 166 - DNA, 93 bp, homo sapiens
tgctaatgttttatgatttcttaaatttattcttactgatcagttagcttttgctgtataaccagccatgctaatattttatgatttcttaaa

SEQ ID NO: 167 - DNA, 84 bp, homo sapiens
agcaagaggatagcaaaaggatagcaacccagtggttgcaaaccagtggttgctatccccagcaagaggatagcaacccagtgg

SEQ ID NO: 168 - DNA, 110 bp, homo sapiens
ctggaggagcaaaatgcagatggcgaggttgccctgagatttctaattgcaggaagccactaaaagtgttacaaggactggaggagcaaaatgcagatggtgaggttgcc

SEQ ID NO: 169 - DNA, 92 bp, homo sapiens
ttgaatctcatactaggtctcctcctcctcctcctcctcctcttcttcttcctcatactaagaatcacttgaatctcatagtaggtctcctc

SEQ ID NO: 170 - DNA, 125 bp, homo sapiens
agaggatgtttaagttttgatggatacttgcctgtactctatcctgggcaacagagcgagacactgactcaaaaaaagaaattactggattgagagaatgtttaagttttgatggatacttgcct

SEQ ID NO: 171 - DNA, 125 bp, homo sapiens; identical to SEQ ID NO: 170

SEQ ID NO: 172 - DNA, 150 bp, homo sapiens
tggtttatccttagtataaaccattgctactctacacacacacacacacacacacacacacacacacacacacacacacacacacacacacacacacacacacactggtttatccttagtataaaccattgctactctacacacacacac

SEQ ID NO: 173 - DNA, 444 bp, homo sapiens
gagaattcatactggtgagaaacctttcagatgtaaggaatgtggaagggcctttagtcaaagtgcatccctcagtacacaccagagaatccatactggtgagaaaccctttgaatgtgaggaatgtgggaaagccttcagacatcgctcatcacttaatcagcatcatagaactcacactggggagaaaccctatgtatgtgataaatgtcagaaagctttcagccagaacattagcttggttcaacatttgaggactcattctggagagaaaccttttacttgcaatgaatgtgggaaaacctttagacagattagacaccttagtgaacatataagaattcataccggggagaagccctatgcatgcactgcatgttgtaaaacctttagtcatagagcgtatctaacacatcaccagagaatccatactggggagagacc

SEQ ID NO: 174 - DNA, 75 bp, homo sapiens
cttgagctcaggagttcgaggccagttgggaggccaagtcaggtggatctcttgagcccaggagttcgaggccag

SEQ ID NO: 175 - DNA, 96 bp, homo sapiens
agccacccattctagggcctcctctttgctgagagctgcagagatgacgtgacaacctgcttgcagagaggagccacccactctagggcctcctct

SEQ ID NO: 176 - DNA, 121 bp, homo sapiens
cctgcaggaatatcccagagagaaagttgaggttagattagagcaaggtcggatactggaaggctgggtaagaggctcctgcaggaatatcccagagagaaagttgaggttagattagagc

SEQ ID NO: 177 - DNA, 102 bp, homo sapiens
ggattataagaatataggctatttctgttattagactttttagtattccaaatatcttttgcccatgttttatttggattataagaatataggctatttctg

SEQ ID NO: 178 - DNA, 90 bp, homo sapiens
agggcttctcggtttataaattaaatgctagataccatgattaaatatcatgactcagatgtcacagggcttctcagtttataaattaaa

SEQ ID NO: 179 - DNA, 90 bp, homo sapiens
acttacatggcctcatttaactgcaataactcatcctatgctgagtaatattctgttggccagaacttacatggcctcatataactgcaa

SEQ ID NO: 180 - DNA, 84 bp, homo sapiens
atttctttattgattttctcctgaggtttatttgctctaaggtccagtttaaattcagtatttctttattgattttctcctgag

SEQ ID NO: 181 - DNA, 94 bp, homo sapiens
tgccactgcaatccagccagggtggcagatttttaaaaaaaatctgcagtgagtcaagatcatgccactgcaatccagccagggtggcagattt

SEQ ID NO: 182 - DNA, 104 bp, homo sapiens
agctagacacagagtgctgattggtgtatttacaattctctagctagaggtaaaaattctccaaaaccccaccagatgaactagacacagagcactgattggtg

SEQ ID NO: 183 - DNA, 106 bp, homo sapiens
agaccagcctgggcaacatggtgaaaccccatctctacaaaaaaaaaaaaaaaaaaattatgaggtcaggagtttgagaccagcctggccaacatggtgaaacccc

SEQ ID NO: 184 - DNA, 180 bp, homo sapiens
tgtctagctagaggattgtaaacacaccaatcagcgctctatgtctagctaaaggtttgtaaatgcacccatcagcactctgtaaaaatgtaccaatcagcactctgtcaaaacacaccaatcagtgtttgtgtctagctaaaggtttgtaaatgcaccaatcagcactctgtaaaaatg

SEQ ID NO: 185 - DNA, 76 bp, homo sapiens
cacaaaagaagtgaaaatggctggttcctgccttaactgatgacattccaccacaaaagaagtgaaaatggccggt

SEQ ID NO: 186 - DNA, 108 bp, homo sapiens
cctctgcccggccgccaccccgtctgggaagtgaggagcgtctctgcctggccacccatcgtctggaaagtgaggagcccctctgcccggccaccaccccgtctggga

SEQ ID NO: 187 - DNA, 96 bp, homo sapiens
ggagttttgctcttgttgcccaggtgtgagccactgcacctggctggtttttgtttgtttgttttttgagatggagttttgttcttgttgcccagg

SEQ ID NO: 188 - DNA, 72 bp, homo sapiens
gtcagccccccgccaggccagccgccccgtctgggagggaggtgggggtgtcagccccccgcccggccagcc

SEQ ID NO: 189 - DNA, 96 bp, homo sapiens
aagaaacagatgcacaggccaatgagctctgtggagaccccaagaggatacagccactgctacaaaagaaacagatgcacaggccaatgaactctg

SEQ ID NO: 190 - DNA, 122 bp, homo sapiens
gaacataaattgtgaagacttcatggacattaatcagttcccaaaattaatacttttataatttcttacgcctgtctttactgcaatctctgaacataaattgtgaagatttcatggacatt

SEQ ID NO: 191 - DNA, 75 bp, homo sapiens
gaggcaggagaatcccttgaaccctggaggtggaggttgcagtgagaaggagaggcaggagaatcccttgaaccc

SEQ ID NO: 192 - DNA, 119 bp, homo sapiens
tattattattaattattattattgagaaaatggaagtaatacttgcttagaacaacgcatgtggtaactgcacaataaaaggtattattattaattattattattgagaaaatggaagt

SEQ ID NO: 193 - DNA, 85 bp, homo sapiens
cttgcccctcctccagaaaagcggagaaggggtagagacaaagagagaaggggttggggtacttgcccctcccccagaaaagcgg

SEQ ID NO: 194 - DNA, 144 bp, homo sapiens
ctgtataggtgtatatatgtgtgtgtgtgtgtgtgtgtgtgtgtgtgtgtgtatatgtatatatatgtgtgtatatatatgtgtatatatatgtgtgtatatatatatacacgtgtgtgtgtgtgtgtgtgtgtttgtgtgtgt

SEQ ID NO: 195 - DNA, 85 bp, homo sapiens
caggacagtaggtataaaccagaactcactgtttagttagttctaaacagttagtgagtgacaggacagtaggtataaaccagga

SEQ ID NO: 196 - DNA, 100 bp, homo sapiens
atttccagaaaattcagagtaaaagtagaaaaattgctttgagtcaactgcaaccaagaactgggaatatttccagaaaattcagagtaaaagtgaaaag

SEQ ID NO: 197 - DNA, 80 bp, homo sapiens
agtctctaggaagttccaaatttccccacatcttcctgtcttccgagccctccaagtctctaggaagttccaaactttcc

SEQ ID NO: 198 - DNA, 117 bp, homo sapiens
cttcttatttttgaatttacttttggtggggtgagactttttttgtcataactgaagaaatcataactatatagcttcttatttttgaatttacttttggtggggtgagactttttt

SEQ ID NO: 199 - DNA, 98 bp, homo sapiens
aggcaagagaagaccaaagccccccctgagaatcaggaaagcctatagtgtaagttccagtctgactttgatccaaggcaagagaagaccaaagtccc

SEQ ID NO: 200 - DNA, 221 bp, homo sapiens
ttgtaaatacaccaatcagcactctgtgcccagctcaaggtttgtaaacacaccaatcagcaccctgtgtctagctcaaggtttgtaaatgcaccaatcagtgctctgtggggacttggagaacgtttgtgtctagctcagggattgtaaacacaccaatcagcaccttgtcaaaacagaccaatcagctctctgtaaaacagaccaattagctctctgta

SEQ ID NO: 201 - DNA, 85 bp, homo sapiens
ctttaactcaatcccagatataccatttccataaggcagttacttatgacctctgatccgctttaactcaatcccagatatccaa

SEQ ID NO: 202 - DNA, 109 bp, homo sapiens
ttaatgtcccaggatatggtatatcctctatatatgggatatatagattgaaatttcccaaaatttgttaatgtgtgcttaatgtcccaggatatggtatatcttctat

SEQ ID NO: 203 - DNA, 131 bp, homo sapiens
tcactagggactgttggtcagtgggtgcaggacagtgggtgcagtgcaccgagcgtgagcatttccaactgaggtaccaggttcatttcactagggactgttggtcagtgtgtgcaggacagtgggtgcag

SEQ ID NO: 204 - DNA, 71 bp, homo sapiens
tcttgtatcctctgtactctcctcaatgtagctggtggagagtatatcctatatccactcttgtatcctct

SEQ ID NO: 205 - DNA, 269 bp, homo sapiens
tagatacagagtgctgattggtgcatttacaaaccctgagctagacacagagtgctgattggtgcattcacaaaccttgagatagacacagagtgccgattggtgcattcacaatcctttagctagacataaaggttctccaagtccccaccagatcagctagacacagagtgcagattggtgcatttacaaaccttgagctagacacagagtgctgattggtgaattcacaaaccctgagctagacacagggtgctgattggtgtgtt

SEQ ID NO: 206 - DNA, 71 bp, homo sapiens; identical to SEQ ID NO: 204

SEQ ID NO: 207 - DNA, 89 bp, homo sapiens
tgagaggagtctcactcttatcaccacgctggagataagtctcaccaccaggctggagataagtgagacgagtctcactcttatcacca

SEQ ID NO: 208 - DNA, 120 bp, homo sapiens
ttattgttatttaatccaaatcattagcagtttttcttttttttttctttttgagacagcagtttttctttttcttattgttatttaatccaaatcattagcagtttttcttttttcttt

SEQ ID NO: 209 - DNA, 75 bp, homo sapiens
cacccacatcctgctgattggtccattttacagagagccgattggtctgttctacagagagctgattggtccatt

SEQ ID NO: 210 - DNA, 73 bp, homo sapiens
tggttcattgatttggtataatagttcattggtataatagttcatttggtataatagttcatttggtataata

SEQ ID NO: 211 - DNA, 93 bp, homo sapiens
agctactcaggaggctgaggcaggagaattggctgggcatggtggtgcacacctgtaatcctagctactcagaaggctgaggcaggagaattg

SEQ ID NO: 212 - DNA, 85 bp, homo sapiens
acaatgagtatatatctttatacatctatctatctatctatctgtttgcaccgagccaacaatgaatatatatctttatacatct

SEQ ID NO: 213 - DNA, 94 bp, homo sapiens
gatgaccagctgcagagaggagctgcccactccagggtctcctctctgctgagacctgcagacgctgagatgaccagctgtagagaggagctgc

SEQ ID NO: 214 - DNA, 86 bp, homo sapiens
tgaaaccccatctctactaaaatataaaaaattagccaggtgctaatttttagccaagatggtgaaaccccatctctactacaaat

SEQ ID NO: 215 - DNA, 97 bp, homo sapiens
tgtcctcttttgctgcttttctccttcaccgctcaattgcaccatacaaatgtcctcttacatacaaatgtcctcttatgctgcttttctccttcac

SEQ ID NO: 216 - DNA, 76 bp, homo sapiens
tttttttgtatttttagtagagacggggtttcaccgtgttagccaggatggatttttttgtatttttaatagagac

SEQ ID NO: 217 - DNA, 85 bp, homo sapiens
tttctgggggaggggcaagtatccgaaccccttctctccgtgtctctaccccttctctgcgtttctgggggaggggcaagtaccc

SEQ ID NO: 218 - DNA, 110 bp, homo sapiens
taccacaacattgtttataatgctaaaacattgtttatagtattgtaaatttataaattagtatataaacattgttagtatataccacaacattgtttataatgctaaaa

SEQ ID NO: 219 - DNA, 75 bp, homo sapiens
tgatggttatgaaggcaatgtaatagttctaataaaagatggatattaacaatgacggttatgaaggcaatgtaa

SEQ ID NO: 220 - DNA, 110 bp, homo sapiens
tgctatctcatggctaaggttccaagctattggatctttgtttgtgtgtgggtatatacatgtcttttgtactgctatctcatggctaaggttccaagctattggatctt

SEQ ID NO: 221 - DNA, 93 bp, homo sapiens
attaatatgattcccctcctaactaaagctaataaactaaagctaatattgttatatctattgtgtattaatatgattctcctcctaactaaa

SEQ ID NO: 222 - DNA, 82 bp, homo sapiens
taatttatcttgatgccatctctattgtcactgaatcctgtagattctgaccccctaatttatcttgaagccatctctattg

SEQ ID NO: 223 - DNA, 196 bp, homo sapiens
agattagctagatacagagtgtccacataaaggttctccaagtccccaccagagtagctagatacagagtgtcaattggtgcattcacaaaccctgagctagacacagggtgctgattggtgtgtttacaaaccttgagctagatatagagcgccgattggtatatttacaatcccttagctagacatagaggttc

SEQ ID NO: 224 - DNA, 119 bp, homo sapiens
aatatttgaagcaaggtatttatttgtatcagctgattcttcagaaccaagaatatggtcgctgttcaaacctcagagcaacaaatatttgaagcaaggtatttatttctatcagctga

SEQ ID NO: 225 - DNA, 85 bp, homo sapiens
atataaacagaaatctggaaaatagtcatgggaatggatactgcttgagttttctaatttatataaacagaaatctggagaatag

SEQ ID NO: 226 - DNA, 97 bp, homo sapiens
tttctacccacttccattaagtaaatactgaaaaactgtattttgaatatagttgttgtttttaaaaaaatctgtttctacccacttccattaatta

SEQ ID NO: 227 - DNA, 139 bp, homo sapiens
ttttctctctagctagagtattgtaaatgcaccaatcagtgctctgtgtctagctaaaggattgtaaatgcaccaaccagcactctgtaaaaacgcaccaatcagcactctgtgtctagctaaaggattgtaaatgcac

SEQ ID NO: 228 - DNA, 116 bp, homo sapiens
ccaaacctcagtgacttaagaaataaagtttttttcttgttcctatatgttcatatgctataattaaatcatttttttcccccaaacctcagtgacttaagaaatacagttttttt

SEQ ID NO: 229 - DNA, 91 bp, homo sapiens
ttttttttagtttcaccatgttgtatttttttttttttttagttttttgattgtttgtttatttttgttttgttttagtttcaccatgttg

SEQ ID NO: 230 - DNA, 150 bp, homo sapiens
tttgggaactgataaatgtccatattaaaatgaaatcttcacaatttatgttcagagattgaagtaaagattggcgtaagaaattataaaagtattatttgggaactgatatatgtccatattaaaatgaaatcttcacaatttatgttc

SEQ ID NO: 231 - DNA, 80 bp, homo sapiens
agtatagatagatgtccatataagcatggacataaagtgtagatagttatgtgtacagtatagatagatgtccatgtaag

SEQ ID NO: 232 - DNA, 103 bp, homo sapiens
gacatgaagttcttcataatattctcttcttatccttaaaactcagtgtctatggttatttaagttgtttaatttatcgacatgaagttgttcataatattct

SEQ ID NO: 233 - DNA, 158 bp, homo sapiens
agctagatacagagtgtggacacaaaggttctccaaggccctaccagagtagctagatacagagtgtggattggtgcattcacaaaccctgagctagacacagggtgctgattggtgtgtttacaaaccttgagctagatacagagtgcggattggtg

SEQ ID NO: 234 - DNA, 117 bp, homo sapiens
tatttagatgatttagatagagaaaatagaatgggatgtgtgtgtgtgtgtatgcgcgtgtgggtgtgtgtatactgggggagatatttagatgatttagatggagaaaatagaatg

SEQ ID NO: 235 - DNA, 116 bp, homo sapiens
agttttcaaaagatactttagggtatgcttccctgggttatatatatgtatatatatttttttttttttggggggggggagttttcaaaagatactttaggatatgcttccctggg

SEQ ID NO: 236 - DNA, 103 bp, homo sapiens
tattataatgtaatatatattacatattataatgtaatatttattacatattattatgtaatatattactacatattataatgtaatatattattacatatta

SEQ ID NO: 237 - DNA, 103 bp, homo sapiens
ttcattcatttagtcaatcagcaaacatttattgagtccctattatgtgctagaaatgcttattgagtccctattatgttcattcagttagtcaatcagcaaa

SEQ ID NO: 238 - DNA, 103 bp, homo sapiens; identical to SEQ ID NO: 237

SEQ ID NO: 239 - DNA, 126 bp, homo sapiens
tctcactgtgtttcccaggctggagtgcagtggtgtggtcatagcccacagcaaccttttttttttttttttttttttttttgacagggtctcactctgtttcccaggctggagtgcagtggtgtg

SEQ ID NO: 240 - DNA, 89 bp, homo sapiens
taatacctgcatattatacaaagttaaattgatacaaaaggaaaattgtgtgtgtgtgtatgtaatacctgcatcttatacaaagttaa

SEQ ID NO: 241 - DNA, 108 bp, homo sapiens
caccaatcggcactctgtatctagctcaaggtttgtaaacacaccaatcagcaccctgtgtttagctcaaggtttgtgagtgcaccaatcgacactctgtatctagct

SEQ ID NO: 242 - DNA, 99 bp, homo sapiens
tgagcaatgggatctgatgccttttgatggctgcttttttagctaccttatcagcataagcattgtcttgagcgatgggatctgatgccttttgatggc

SEQ ID NO: 243 - DNA, 74 bp, homo sapiens
ttcagacttggactggaacttaccccatgggctcttctggttctcaggctttcagacttggactggaactctac

SEQ ID NO: 244 - DNA, 93 bp, homo sapiens
gtgaaagagaaggggttgaggggtacttgcctctcccccagaaaagcaggacttgccactaagggtgaaggagaaggggttgaggggtacttg

SEQ ID NO: 245 - DNA, 101 bp, homo sapiens
agcaattcctcttatttgtttggtatattgaaggttagtatgaggctttttttttttaatggtctttcgttttcccccagcaattcatcttatttgtttgg

SEQ ID NO: 246 - DNA, 119 bp, homo sapiens
taagttatgatacctacaagtctgaacatataaaattaatctcttgtaaatccatttatttagggtaagtaaatggatgattcttataagttatgatacctacaagtctgaacttataa

SEQ ID NO: 247 - DNA, 106 bp, homo sapiens
tctctacaggctcatgcccccagctcagctaccctcagttcccgcagaatagcaggagcaactggtaaacctctctacaggctcatgcccccagctcagctaccct

SEQ ID NO: 248 - DNA, 113 bp, homo sapiens
gctatatagtttgagaggccctgtgcaaaatgaaaaggggtgtgtgtgtaacaaccctccccacaacttttcattgctatgtagtttgagaggccctgtgcaaaatgaaaagg

SEQ ID NO: 249 - DNA, 72 bp, homo sapiens
cattcttatttatttttgtatctatgtgagttccttgaggacaagggccatttcttatttatttttgtatct

SEQ ID NO: 250 - DNA, 78 bp, homo sapiens
gttgaagtcctagtaagaattactcatatgtggagatattaagtcctagtaagttgaagtcctagtaagaaatactca

SEQ ID NO: 251 - DNA, 95 bp, homo sapiens
tcagtaaatactaatacttgttgaaatttgttcaatgttgtatcctgagaccccgtcacatagtaaatactcagtaaatattaatacttgttgaa

SEQ ID NO: 252 - DNA, 137 bp, homo sapiens
taaagttacatacagtaatccatttaaaatatttaaaccctttacttttggaaaaaaatatgaataggtttcctaatatgaattggaaacctaaagttacatacagtaatccatttaaaaatatttaaaccctttac

SEQ ID NO: 253 - DNA, 101 bp, homo sapiens
gtaaatttgaatgaactaaagatatatctctaccttctcatttgaatatctttagttcattcagatttactaattttggtaaatctgaatgaactaaagat

SEQ ID NO: 254 - DNA, 95 bp, homo sapiens
cttgtttaggcttcttgtatcttttcacaagtgactttttctacatctgctagaaatgtgggtttttaggcttatttaggcttcttgtatctttt

SEQ ID NO: 255 - DNA, 116 bp, homo sapiens
atgaagtagcttgaccaaggtcacaaatttaaaagaggcagaggcagggatgcttaaacagtgaaactagggttcagaactatgaaatagcttgaccaaggtcacaaatttaaaag

SEQ ID NO: 256 - DNA, 88 bp, homo sapiens
cctgacttttttgcttttttatttctctggtaactttgcagaaatacaacataatttcttcctgacttttttgctttttcatttctct

SEQ ID NO: 257 - DNA, 155 bp, homo sapiens
caatcggcactctgtatctagctcaaggtttgtaaacacaccaatcagcaccctgtgtctggctcagggtttgtgaatgcagcaatcgacactctgtatctagctactctggtggggacttggagaacctttgtgtggacactctgtgtctagct

SEQ ID NO: 258 - DNA, 128 bp, homo sapiens
ttgacaattttcttaattactcttatcttgatttgtttaccattggtatggtatttatctcttgccccctataaattgtatgatctttgacaattttcttaattactcttatctcgatttgtttacca

SEQ ID NO: 259 - DNA, 82 bp, homo sapiens
tagctgggtggttctgctcaaaacctgttctcagaacagttttgtggttgcgaatagctgggtggttctgctcaaaacctgt

SEQ ID NO: 260 - DNA, 122 bp, homo sapiens
tttttaagtttatttcttatgataatggtagggagagggaaaattattgatttatacaactatgtgtatggatatatgaagcaagactttttaagtttcatttcttatgataatggtaggga

SEQ ID NO: 261 - DNA, 149 bp, homo sapiens
taataccagtctcaatcatcacttctctttcctggttctctttcccaagcctcataagcaaatgagaacaatcttctccatcactgggagtaattaataccagtctcaatcatcacttctctttcctggttctctttcccaagcctcat

SEQ ID NO: 262 - DNA, 88 bp, homo sapiens
tggaagagtgaaacgatggaaaagtcaagagtagccaagcacacaagtcaagagtaaattcatattggaagagtgaaacgatggaaaa

SEQ ID NO: 263 - DNA, 96 bp, homo sapiens
ataaaacatttgataaaatgaacctgtcatttaagagcctgataaaatgtcatttaagagcctgataaaacatttgataaaatgaacctgtcattt

SEQ ID NO: 264 - DNA, 87 bp, homo sapiens
agcactgggattacaggcatgagccacctcaagcaatccttctatctggggccttccaaagcactgggattataggcatgagccacc

SEQ ID NO: 265 - DNA, 90 bp, homo sapiens
taatgtaaaaattattacactaaacttttgactcctcttttgttcatttgtggattaagtggtataatagtaaaaattattacactaaac

SEQ ID NO: 266 - DNA, 79 bp, homo sapiens
tctctaggaagttccatactttcccgcatctttctgtcctctgagccctccaattctctaggaagttccaaactttccc

SEQ ID NO: 267 - DNA, 100 bp, homo sapiens
aatggaaataacaccaagagttttttaccttctgattttctttttataaacaggaagctcttccacgagttcacgaatggaaataacatcaagagttttt

SEQ ID NO: 268 - DNA, 103 bp, homo sapiens
cacttaatgtttgtactgataatagtacagttatcattacattaaaaagttatcattacattaaatgtcagcacttaatgtttgtaatgataatagtacagtt

SEQ ID NO: 269 - DNA, 75 bp, homo sapiens
ggttgttgggttgttgtgaggatgggaggagccaatgagcaggtaagtttgggttgttgggttgttgtgaggatg

SEQ ID NO: 270 - DNA, 84 bp, homo sapiens
ctgcatctggtggcaggctttatagtggcaaataagttgaggtacttcaattgcacaactgcatctggtggcaggctttaagtc

SEQ ID NO: 271 - DNA, 125 bp, homo sapiens
gaacataaattgtgaagatttcatggacatttattagttccccaaattaatacttttataatttcttatgcctatctttactgcaatctctgaacataaattgtgaagatttcatggacacttat

SEQ ID NO: 272 - DNA, 117 bp, homo sapiens
agtttttctgtcaaggtatatttggggaaataatcttggatctaaatttgtctgtgaaggtatatttgggaaaataatcttagatctgaatttgtctgtgaaggtacatttgggaaa

SEQ ID NO: 273 - DNA, 112 bp, homo sapiens
ttgttcaagccttctgaaaatttcaaaatgccatttaaacgtaattatagaacacatattttgtttttgtttttttttttttgctgttgttcaagccttctaaaaatttcaa

SEQ ID NO: 274 - DNA, 79 bp, homo sapiens
atgcttaagttattgctgtcaggtgtgtctgtcacacagggtcattctcaggttatgcttaagttattgctgtcaggtg

SEQ ID NO: 275 - DNA, 87 bp, homo sapiens
aatttttaattgatagaataatgaaaaattacaacttttatttctgttatttacaattgaatttttaattgatagaatagtgaaaaa

SEQ ID NO: 276 - DNA, 89 bp, homo sapiens
cgggacttgccgctaagggtgaaggagaaggggttgaggggtacttgccctgccccaggaaagcgggacttgctgctaagggtgaagga

SEQ ID NO: 277 - DNA, 121 bp, homo sapiens
ctggctggccatgtactaaatagtacatgcactgagtgagacaatgcagtatgtcagttttgtatcctggctggcctttttgtattctggctggccatgtactaaatagtacatgcactga

SEQ ID NO: 278 - DNA, 83 bp, homo sapiens
atacaccatagaatactatacagccataaaaactaatgaaatcatgcccttatatgcaaatacaccatagaatactacacagc

SEQ ID NO: 279 - DNA, 100 bp, homo sapiens
catagaagataacattggaaatgacatttgatgaataaaagacttaaagatgaaaccttaaactataaaaccatagaagataacattggaaatgacattt

SEQ ID NO: 280 - DNA, 122 bp, homo sapiens
aaaaatatatatataatagtaataatagtggaggacttcaacatccagcctggagacagagcaagactccatctaaaaatatatatatataatagtaataatagtggaggacttcaacatcc

SEQ ID NO: 281 - DNA, 120 bp, homo sapiens
caatgaaaaacaacaaatttgttctgctatactgtagaaagtttcaggaatttaaggtagttgaaacccaactgcctagagagaaaccaatgaaaaacaacaaatttcttctgctatact

SEQ ID NO: 282 - DNA, 193 bp, homo sapiens
acaaggtattgtgatcatctgatactttactaattcatatacaaagtattgtgatacattacaaagtgttgtgatatatatactttactaattcatatacaaagtattgtgatcatctgatactttactattttaatgcctttaagatttttaaaacatacacaaagtattgggatcatctgatactttacta

SEQ ID NO: 283 - DNA, 123 bp, homo sapiens
gaaaagaaaaggtttctataccagatataaatgtactccaaaagaagggagggagggagggaggaaggaaggaaggaaagagaaaagaaaaggtttctatacaagatataaatgtactccaaa

SEQ ID NO: 284 - DNA, 125 bp, homo sapiens
gaacataaattgtgaagatttcatggacatttattagatctccaaattaatacttttataatttcttacgcctgtctttactgtaatctctgaacataaattgtgaagatttcatggacacttat

SEQ ID NO: 285 - DNA, 94 bp, homo sapiens
ggggtttgttgtacagattatttcatcacccaggtattaagcctagtattatataggtaaacttgtgtcatggggtttgttgtacagattgttt

SEQ ID NO: 286 - DNA, 97 bp, homo sapiens
accacccgggtaaggaaggactttttatttgaagaaagactgtagaggaatgaagaagtaaggaataccacctgggtaaggaaggactttttatttg

SEQ ID NO: 287 - DNA, 86 bp, homo sapiens
attgatttataatcctttgggtatatacccaataatgggattctacatgtgtctttatagtagattgatttataatcctttgggaa

SEQ ID NO: 288 - DNA, 122 bp, homo sapiens
tgaaggcaatttaattatttttttcatatccttgtgtactatatattttaaagtagagaaattagtgcaatctggcataaagttatgaaggcactttaattatttttttcatatccttgtgt

SEQ ID NO: 289 - DNA, 123 bp, homo sapiens
acataaattgtgaagatttcatggacatttattagttacccaaattaatacttttataatttcttacacctgtctttactgcaatctctgaacataaattgtgaagatttcatggacatttat

SEQ ID NO: 290 - DNA, 104 bp, homo sapiens
attcatatgtggaagctaaaatgttgatatcaagaagaaataagccagattcaataagacaaatattgcatgttcttattcacatgtggaagctaaaatgttga

SEQ ID NO: 291 - DNA, 114 bp, homo sapiens
aagaaaggaatcaattacacagtgctctataaaaccaaaactgtactcagactagactaactaggacggagttttaaagacaggaatcaattacacagtgctctataaaaccaa

SEQ ID NO: 292 - DNA, 137 bp, homo sapiens
cagctattcatcaggaggctgatgtgggggatctcttgagcctgggagatcaaggctgcaaaattaactgggtatggtggcacacgcctatagtctcagctattcatcaggaggctgatgtggaggatctcttgagc

SEQ ID NO: 293 - DNA, 141 bp, homo sapiens
tttattttgagacagagtctcactctgtcacccaggctggagtgcagctgtcctgatgctcaggctaattaccttctatcttatttatttatttattttttatttagagacagagtctcactctgtcacccaggctggagt

SEQ ID NO: 294 - DNA, 87 bp, homo sapiens
ttatagtaactaacccggactctctgtggatggtccttagtctaaactacctgcatggattattttatagtaactagcccggactct

SEQ ID NO: 295 - DNA, 95 bp, homo sapiens
cttcacttcagcctctgattggtcccctcccaaaaccaatctgatgtttgcataggggtataattttgtaacttcacttcagcctctgattggtc

SEQ ID NO: 296 - DNA, 93 bp, homo sapiens
gtcatattacaatattcagcaaagttggggtaaataaagaaaaatgtaagttttcccagttacccctaatgtcatattaaaatattcagcaaa

SEQ ID NO: 297 - DNA, 93 bp, homo sapiens
tgggttcaagtgattctcctgcctcagcctccccagtagctgggtgccaacctctgactcatgggttcaagcgattctcctgcctcagcctcc

SEQ ID NO: 298 - DNA, 147 bp, homo sapiens
tgtgtacagaattccttgttctgtcagctcagagggcctagaaggaacattttagtgttacagacatgtatatatgcattttgtgtgtgtgtgtgcatgtgtatgtgtacagaattccttgttctgtcagctgagagggcctagaag

SEQ ID NO: 299 - DNA, 133 bp, homo sapiens
gaacataaattgtgaagatttcatggacatttatcagttcccaaaattaatacttttataatttcttacgcctgtctttattgcaatctctgaacataaattgtgaagatttcatggacatttatcacttccc

SEQ ID NO: 300 - DNA, 75 bp, homo sapiens
ctgtatctagctactctggtggggccttggagtacctttgtgtgggacactctgtatctagctaatctggtgggg

SEQ ID NO: 301 - DNA, 93 bp, homo sapiens
ctctgtgtctagctaaaggtttgtaaatgcaccaatcagcactctgtaaaaacacaccaatcagcactctgtgtctagctaaaggtttgtaaa

SEQ ID NO: 302 - DNA, 75 bp, homo sapiens
aatgtcatcggttaaggcaggaacaggccattttcacttcttttgtggtggaatgtcatcagttaaggcaggaac

SEQ ID NO: 303 - DNA, 75 bp, homo sapiens
tcagttaaggcaggaacaggccattttcacttcttttgtggtggactgtggtcagttaaggcaggaaccggccat

SEQ ID NO: 304 - DNA, 97 bp, homo sapiens
tatatatttaaagcactgttcaagcaaaggtttttatatatatgtgtgtgtgtgtgtgtgtgtgtgtgtgtatatatttaaagcactattcaagcaa

SEQ ID NO: 305 - DNA, 92 bp, homo sapiens
aaagaaaaactgaaaaactatcatagatcaaactatcataaatatcaatattttttaatgaaagaaaaactgagaaactatcatagatcaaa

SEQ ID NO: 306 - DNA, 97 bp, homo sapiens; identical to SEQ ID NO: 304

SEQ ID NO: 307 - DNA, 92 bp, homo sapiens; identical to SEQ ID NO: 305

SEQ ID NO: 308 - DNA, 88 bp, homo sapiens
cttttctggggaaggggcaagtaccccaaccccttctctccttgtctctaccccttctctgcttttctgggggaggggcaagtacccc

SEQ ID NO: 309 - DNA, 92 bp, homo sapiens
tattcaaatataattattcaaatgacttcatggtattccattgtcagaatgaactatttatcatcaaaatattcaaatataattattcaaat

SEQ ID NO: 310 - DNA, 71 bp, homo sapiens
tacaatgcaataagcaatttgtttttcatttttttccttctcttttcttacaatgcaataagcaatttgat

SEQ ID NO: 311 - DNA, 105 bp, homo sapiens
ttgtcctgagcgatgggatctgatgccttttgatggctgcttttttagctaccttaccagtataagtgttgtcctgagtgatgggatctgatgccttttgatggc

SEQ ID NO: 312 - DNA, 108 bp, homo sapiens
agctagatacagagtgtcgattggtgcactcacaaaccctgagctagacacagggtgctgattggtgtgtttacaaaccttgagctagatacagagtgccgattggtg

SEQ ID NO: 313 - DNA, 111 bp, homo sapiens
ttttaggaccctgctatatatgtgtatacatagctacatatattttaggaccctgctatatatgtgtatatatagctatatatattttaggaccctgctatatatgtgtat

SEQ ID NO: 314 - DNA, 82 bp, homo sapiens
cttccaacccggattcatatgaaaaatgactccatacttatactatcccattttttccccttccaaccctgattcatatgaa

SEQ ID NO: 315 - DNA, 124 bp, homo sapiens
aaatgtccatgaaatcttcacaatttatgttcagagattgcagtaaaaacaggcgttaagaaactataaaagtattaattttgggaactgataaatgtccatgaaatcttcacaatttatgttc

SEQ ID NO: 316 - DNA, 71 bp, homo sapiens
gcttctattaaatttaattacttcccctgtggctttaaatcaagggcagcttctgttaaatttaattactt

SEQ ID NO: 317 - DNA, 81 bp, homo sapiens
atttctgtgtctttgtgtcttaccatacctgattaaaataaatcctgagtacctgatttctgtgtctttgtgtcttaccat

SEQ ID NO: 318 - DNA, 103 bp, homo sapiens
aaagcaatttacatacagggagtgggggcttagggaaccaaagcaatttacatacagggagtgggggcttagggaactaaagcaatttacatacagggagtgg

SEQ ID NO: 319 - DNA, 108 bp, homo sapiens
tatagttttataacccttatggcttatagtattctgccaaagtaagcacaaaaccacttgatcaaaaatgctatagttttataacccttatggcttatagaattctgc

SEQ ID NO: 320 - DNA, 152 bp, homo sapiens
attggctctagaagtctaactactataaatgtttgtggattctggagtgccctcttgtcaacactaggacgtgtctagaaaacaaacctcattcctccattggttctagaagtctaactactataaatgtttgtggattctggagtgccctc

SEQ ID NO: 321 - DNA, 135 bp, homo sapiens
aaaaaaagataggtaatttaaaatgtttaaataaaaattaaactcataaatacataaataaagctaactacagtctaagaatcaataggaaaaaaagataggtaatttaaaatgtttaaataaaaattaaactca

SEQ ID NO: 322 - DNA, 81 bp, homo sapiens
agggtctcattgttgcctatatattgcctataaattataaatttttttgtagagacagggtctcactgttgcctatatatt

SEQ ID NO: 323 - DNA, 101 bp, homo sapiens
ataaagaagttaattcatgtatatatacacacatatatatgtttattaaaatcttcatgtatatatacatatataaataaagaagttaattcatgtatgta

SEQ ID NO: 324 - DNA, 85 bp, homo sapiens
tgaaggtaattgaatcatgggggcagttccataatccccacgtgtcaagagagagaccagatgaaggtaatggaatcatgggggc

SEQ ID NO: 325 - DNA, 120 bp, homo sapiens
ctggctgaaatatctgaaagtcaactttgttagaactaaaataaaagattaacaatcttttaacaaaagatttcacaaatctacactggctgaaatatctgaaagtcaattttgttagaa

SEQ ID NO: 326 - DNA, 114 bp, homo sapiens
cctttagctagacacaaaagttctccaagtccccacccaactagctagacacagagtgctgattggtgtgtttacaatcctttagctagacagaaaagttctccaagtccccac

SEQ ID NO: 327 - DNA, 111 bp, homo sapiens
ggtccctggaccctgctgattagaatagttgcactcaccgatgcagtagcagaaacaacccctgcccaagaacccacaacggtccctggaccctgctgatcagaatagttg

SEQ ID NO: 328 - DNA, 148 bp, homo sapiens
agttatataaaatattttaattaagtataaaataatttaaatattttaattaagttatataaaatatcttaattaagagttggctttttacttttagcagtaacttgtttactgataagactgagttatataaaatattttaattaag

SEQ ID NO: 329 - DNA, 96 bp, homo sapiens
tctcactcaacccattcaagacaaaactttcaagtacaacttgcccttcctgctattcatgctccatctcactcaacccattcaagtcaaaacttt

SEQ ID NO: 330 - DNA, 105 bp, homo sapiens
agagataaggagatactcaagtcactttaagttagagatgagattttagagataaggagatagagatttagagatttgagagagaaggagatactcaagtcactt

SEQ ID NO: 331 - DNA, 94 bp, homo sapiens
cagtaaggccatcagggacccagaaacaagaagtagaaaggtagccagtctagggcttgtatagcagtgcccagtaaggccatcagggacccag

SEQ ID NO: 332 - DNA, 98 bp, homo sapiens
cttgttttctgaatacaaaaattacccttataccctaatattacccttatattaccttatacccttgttttctgaataaaaaattacccttataccct

SEQ ID NO: 333 - DNA, 89 bp, homo sapiens
tttttatataaagctgctttttacataaagaagactctgaatttcaggtatggtatatttttatattaagctgctttttacataaagaa

SEQ ID NO: 334 - DNA, 79 bp, homo sapiens
ctacccattgagatgaaaacaataagcctatatgtgtcttggtgtcaagaaacagcctacccactgagatgaaaacaat

SEQ ID NO: 335 - DNA, 123 bp, homo sapiens
atttacaatcccttagctagacataaagattctccaagtccccaccagattaaatagatacagagtgctgattggtgtatttacaatcccttagctagacataaagattctccaagttcccac

SEQ ID NO: 336 - DNA, 126 bp, homo sapiens
acccacccacatcttgctgattggtccattttgcagagagcagattggcccattttacagagagccaatgggcccattttacagagagctgattggtccgttttgatagggtgctgattggtgcat

SEQ ID NO: 337 - DNA, 189 bp, homo sapiens
aggtagacacagagcactgattggtgtgtttacaaactttgagctagatacagggcactgattggtgcatttacaaaccttgagctagacacagagtgctgattggtgcatttacaatcatctagctagacataaaagttctccaagtcctcaccagattagctagatacagagtgctgattggtgcat

SEQ ID NO: 338 - DNA, 88 bp, homo sapiens
aatcaaaaagtcactttttaaaaagacatttttaaaatggggcattttaatgtttttaaaaatgttttaaaaagacatttttaaaaag

SEQ ID NO: 339 - DNA, 157 bp, homo sapiens
agattagctagatacagagtgtggacaaaaaggttctccaagtccccaccagagtagctagatacagagtgtggattggtgcattcacaaaccctgagctagacacagggtgctgattggtgtgtttacaaaccttgagctagatacagagtgctga

SEQ ID NO: 340 - DNA, 78 bp, homo sapiens
caagtctctaggaagttccaaactttcccacatcttcctgtcttctgagatctccaagtctctaggaagttccaaatg

SEQ ID NO: 341 - DNA, 98 bp, homo sapiens
agtgagccataatgatgccactgcattccagcctggtcaacagagagagagagagagagaccctatgagtgagccatagtgatgccactgcattccag

SEQ ID NO: 342 - DNA, 88 bp, homo sapiens
actacaggcgcccaccaccacgcctggctaatttttgtattttttactaaaaaaaatacaaaatactacaggcgcccaccaccacgcc

SEQ ID NO: 343 - DNA, 91 bp, homo sapiens
aaaaataagataatatatctctccgagaaacacccaagaatgatcaataaatactaaaaaaaaaaaaaaaaaaaaaaagataatatatctc

SEQ ID NO: 344 - DNA, 84 bp, homo sapiens
gcttgtgagttattgcaaattgatggaatgagaaagtggatttcagaagggttgcagcttgtgagttattgcaaattgatggaa

SEQ ID NO: 345 - DNA, 82 bp, homo sapiens
gcctgggtgacagagcgagaccccgttacggcgagctgagatcgcaccactgcactcctgcctgggtgacagagcaagaccc

SEQ ID NO: 346 - DNA, 123 bp, homo sapiens
ataaattgtgaagatttcatggacatttatcagttcccaaaattaatactttgataatttcttacacctgtctttactgcaatctctgaacataaattatgaagatttcatggacatttatca

SEQ ID NO: 347 - DNA, 116 bp, homo sapiens
gaaaccctgtctctactaaaaatacgaaaattagctgggtgtggtggcatgcgcctgtagccccagcctggccaacatggcgaaaccctgtctctactaaaaatacaaaattagcc

SEQ ID NO: 348 - DNA, 122 bp, homo sapiens
aagacaggcataagaaattataagagtattatttgggaactgataactgtccaggaaatcttcacaatttatgttcagagattgaagtaaagacaggcataagaaattatgagagtattatt

SEQ ID NO: 349 - DNA, 100 bp, homo sapiens
gggcccaggcttaagtgacaccacgctgatgagatattaataatgatcttaaaatgatatggaattggtatttctttgggcccaggcttcagtgacacca

SEQ ID NO: 350 - DNA, 86 bp, homo sapiens
tggatatagtaaatttcactctttagtagtatgtagttgtactctcaaaaaaaaaacaaaacttggatatagtacatttcactctt

SEQ ID NO: 351 - DNA, 77 bp, homo sapiens
ttttttttatatttaaaaaaattattgggaagtttagaagtgggaaaagtggtctttttttgtatttaaaaaaatta

SEQ ID NO: 352 - DNA, 97 bp, homo sapiens
tagctgcttttttagctaccttatcagcataagcattgtcctgagtggtgggatctgacaccttttgatagctgcttttttagctactttatcagca

SEQ ID NO: 353 - DNA, 87 bp, homo sapiens
cctcccaggaaagtggagaaggggtggggagagacacagagagaaggggtggggggtgcttgccccccaggaaagtggagaaggggt

SEQ ID NO: 354 - DNA, 105 bp, homo sapiens
tactgtactgaatacatggtgtagacagatgctacacaatgccaagtatttgtgtatctaaattctacattgtatagtatttactgtactgaatacatggtgtag

SEQ ID NO: 355 - DNA, 101 bp, homo sapiens
gattggttggggaaagcaaccaatcagaggctgaaatgaagttataaagttatactcctatgtaaacgtctgattggttgcggaaagcaaccaatcagagg

SEQ ID NO: 356 - DNA, 92 bp, homo sapiens
ttttaataccaacatacttaattttaataataataaaattttgggctcctatgaaaacttcttttaataacaacatacttaattttaataat

SEQ ID NO: 357 - DNA, 73 bp, homo sapiens
tttgccttgtgacctttgttggatacttattagtagttcggtttttgccctttgccttgtgatctttgttgga

SEQ ID NO: 358 - DNA, 99 bp, homo sapiens
caccaatcagcactctgtaaaaacgcaccaatcagtactgtgtctagctaaatgtttgtaaacacaccaatcagccctctgtaaaaacgcaccaatcag

SEQ ID NO: 359 - DNA, 112 bp, homo sapiens
ctcagtcctccttgtggtctaggaggacaggcaagggtgcaggttttcgagaatgtgtcggtaagggccactaaatctgatcttcctcagtcctccttgtggtctagaagga

SEQ ID NO: 360 - DNA, 186 bp, homo sapiens
agctagatacagagtgtcgattggtgcattcacaaaccttgagctaaacacagggtgctgattggtgtgtttacaaaccttgagctagatacagagtgccgattggtgtatttacaatccctgagctagacataaaggttctccaaggccccaccagagcagctacatacagagtgtagattggtg

SEQ ID NO: 361 - DNA, 150 bp, homo sapiens
accagatataatactgtatagtataatattgtataatttctgtattgtataatattctgaccagatataatactgcatagtataatattgtacagtataattataatatagtataatactgcatagaatactggataatacagtatagaa

SEQ ID NO: 362 - DNA, 71 bp, homo sapiens
tttatagttttcaaagcatgctgtcaaaaagaaatatctatacaatgatttatagttttcaaagcatggtg

SEQ ID NO: 363 - DNA, 99 bp, homo sapiens
aatgggcattaatccattcatgagggtggagctttatggcttatcacctctcaggaatcaccctcatgaatgggcattaatccattcatgagggtggag

SEQ ID NO: 364 - DNA, 89 bp, homo sapiens
ataacctaatatgtaacttaaatgttaaggccccttcatgaatattcatagcttctcccataacctaatatgtaacttagatgttaagg

SEQ ID NO: 365 - DNA, 117 bp, homo sapiens
atagaagtgagtcaatttcctagctatcatggagtatatgtcttaaaagacatacactgaaaatagcctaaacatagaagtgagtcaatttcctagctatcatggagtatatatctt

SEQ ID NO: 366 - DNA, 123 bp, homo sapiens
gggtgtgctggcccatgcctgtagttccagctacttggaaggttgaggcagaagaatcgcttaaactattaaaaatacaaaaattattggggtgtgctggcccatgcctgtagttccagctac

SEQ ID NO: 367 - DNA, 94 bp, homo sapiens
ctaatacaaacttttgacctgggtgattctgatgtgtcaatataattttatcaattataacaaatgtttgctaatacaaacttttgacttgggt

SEQ ID NO: 368 - DNA, 120 bp, homo sapiens
caaactgtccctcacccaccgcagctaaggtaattatcctcacctgcaaccacaggtacacactgtgctttgcttcctatgtcaaactgtccctcacccaccccagctaaggtaattatc

SEQ ID NO: 369 - DNA, 86 bp, homo sapiens
cttatttttaaaatattctccatggcaccatggagaattaaattaggcattaaattaatgccttatttttaaaatattctccatgg

SEQ ID NO: 370 - DNA, 89 bp, homo sapiens
ataagggtctaacaaagatcacatgcttctgagagaacaggacaaaaggcaaaagcagaactactgataagggtccaacaaagatcaca

SEQ ID NO: 371 - DNA, 91 bp, homo sapiens
cagtacagattctgatgattatttccttttggtgtcaacttattctattattcaatagcatttcccacagtacagattctgatgatgattt

SEQ ID NO: 372 - DNA, 102 bp, homo sapiens
caacataggtttcctatagatagcctatgttttctgtagtctgtagcaacataggtacagataacctgtggtctgtagcaacataggtttcctatagatagc

SEQ ID NO: 373 - DNA, 89 bp, homo sapiens
agtagttctgcttttgccctttgtcctgttccctcagaagcatgtgatctttgttagacccttattagtagttctgctttttgcccttt

SEQ ID NO: 374 - DNA, 73 bp, homo sapiens
agtagctctgcttttgccctttgccttgtgatctttgttggactcttataagtagttctgcttttgccctttg

SEQ ID NO: 375 - DNA, 153 bp, homo sapiens
tgtttttcatttcttttgctcacatctgaatcttccatccattcttttttctttcagaactgcttacaccagtttaaatgataaaatttaattcttttatgtttttcatttcttttgctctcatctgaatcttccatccattcttttttcttt

SEQ ID NO: 376 - DNA, 153 bp, homo sapiens; identical to SEQ ID NO: 375

SEQ ID NO: 377 - DNA, 90 bp, homo sapiens
attaatgtctgttttcctagaaaagttttatttttaaagtgacattattttttctacctgaatattaatgtctgttttcctagaaaagtt

SEQ ID NO: 378 - DNA, 86 bp, homo sapiens
tctcaaactcctgagctcaagtgatccacctgcctcaaccttgctattttgcccaggctggtcccaaactcctgagctcaagtgat

SEQ ID NO: 379 - DNA, 93 bp, homo sapiens
cctgagtagctaggaccacaggtgcatcacctgtctcagcctcctgagtagctcctcagcctcctgagtagctaggaccacaggtgcatcacc

SEQ ID NO: 380 - DNA, 73 bp, homo sapiens
tattgagctcaataactcaataactgttaaataatattagcaataataactattgagttcaataactcaataa

SEQ ID NO: 381 - DNA, 113 bp, homo sapiens
tttgcccttgagtttttcacttatttagtcctattttttcatactaaagaacatattttagaaagagtaggcagggaagtttgcccttgagtttttcacttatttagtgctat

SEQ ID NO: 382 - DNA, 95 bp, homo sapiens
cctagtactgaatacaattatattttaaagctcagagttatttaatctttagtgttagttacctagtactgaatacaattttattttaaagctca

SEQ ID NO: 383 - DNA, 115 bp, homo sapiens
cccactggtgtgcactcacctatagcttacccatgttgccccattggtgtgcatgcatgcaggtacccactggtgtgtatgcatgcaggaacccattggtgtgcatccatgcagg

SEQ ID NO: 384 - DNA, 82 bp, homo sapiens
aacatatacaattatcaaacttttgtgtatgttcaaaattattaaattttaaattattaaacatatacaattattaaacttt

SEQ ID NO: 385 - DNA, 185 bp, homo sapiens
caccaatcagtgctctgtgtctagctcagggattgtaaatgcaccaatcagcactctgtgtctagctaaaggtttgtatacccaccaatcagtgctctgtgtctagctaatctagtggggacttggagaaatttacgtctagctggaggattgtaaatacaccaatcagcactctgtgtctagct

SEQ ID NO: 386 - DNA, 78 bp, homo sapiens
attccattgtgtatatataccacgttttcctatattccattgtgtatatattccattgtgtatgtataccaggattcc

SEQ ID NO: 387 - DNA, 97 bp, homo sapiens
aaatttaaaatgataatgaaacattttatctttaatgtagtaagaactcaatttctgacaccagttattgaaagaaatttaaatgataatgaaacat

SEQ ID NO: 388 - DNA, 107 bp, homo sapiens
ttcttttattaaaatgttcttgattctaatgactgtggttctaattagctctagttgaagactttcaataatttgttgtcttattcttttattaaaatgttcttgat

SEQ ID NO: 389 - DNA, 128 bp, homo sapiens
tattattcagccttacgaaagaaggagacctaaatttccagcaatggatgactatataaagaaaatgtgatatgtgcattaaaaagaatattattcagccttacaaaagaaggagacctaaatttcca

SEQ ID NO: 390 - DNA, 186 bp, homo sapiens
agctagatacagagtgtcgattggtgcactcacaaaccttgagctaaacacagggtgctgattggtgtgtttacaaatcttgagctagatacagagtgccgattggtgtatttacaatccctgagctagacataaaggttctccaaggccccaccagagcagctagatacagagtgtcgattggtg

SEQ ID NO: 391 - DNA, 92 bp, homo sapiens
ggcaccagggagaggcagtttcctgatggtctggcagttgttacactaaaatgataattggccacagctggcaccagggagaggcaatttcc

SEQ ID NO: 392 - DNA, 123 bp, homo sapiens
gtttgcaatcctttagctagacacaaaagttctccaagtccccactagattagctagacacagagtgctgattggtgtgtttacaatcctttagctagacacaaaagttctccaagtccccac

SEQ ID NO: 393 - DNA, 104 bp, homo sapiens
attatagaatttaaccaattggaaagtgtcttttatcttttgcttatttcttattagtttgaagaatgtattaaaacattatacaatttaaccaattggaaagt

SEQ ID NO: 394 - DNA, 100 bp, homo sapiens
tgattggttgaagtttcaatcccttagcttgtagccgtgacgcattttagctcaggggaaagtcccctttgattggttgaagtttcaatcctttagcttg

SEQ ID NO: 395 - DNA, 115 bp, homo sapiens
caggttttcaagaatgcattggtaagggcctctaaatccgatttttctcagtcctctttgtggtctaggaggacaggcaagggtgcaggttttcaagaatgcattgtaagggcca

SEQ ID NO: 396 - DNA, 74 bp, homo sapiens
cactcccataatacgatcacctctgctctcattagagttcccattagaaatcactcccataatacaatcacctc

SEQ ID NO: 397 - DNA, 120 bp, homo sapiens
tacatagaactgtagttattttctaggaaaattattcttttactttaacagaaaatcaaccatattaccaatgctacttgtactgtgactacatagaactgtagatattttctaggaaaa

SEQ ID NO: 398 - DNA, 84 bp, homo sapiens
aaatgaagaggctgaagtgaagttacaaagttatttacttggtgtacaccctttgcaaatgaagaggctgaagtgaagttacaa

SEQ ID NO: 399 - DNA, 94 bp, homo sapiens
gagttagtttttgggtaaaaatagctaactaactatatatgtataactatatatatagttatatatatatttagttagtttttgggtaaaaata

SEQ ID NO: 400 - DNA, 83 bp, homo sapiens
agtatttgcagttagcagtggggagattctgaacacactgttgggaggtcctgactacagtatttgcagttagcagtggggag

SEQ ID NO: 401 - DNA, 86 bp, homo sapiens
aaacccacttcaagcagatttttacacttgggacaacctcttccttacttgccattttatctgaaacccacttcaagcagattttt

SEQ ID NO: 402 - DNA, 100 bp, homo sapiens
ctatcaggaacttaaatgaatcaagaagaatatattcgcaaactatgcatccgacaaagctctaatagccagaagctatcaggaacttaaataaatcaag

SEQ ID NO: 403 - DNA, 104 bp, homo sapiens
cttatgagcacatgcacacacacacacacacacacacacacacacacacacatacactctctgtctctgtctctctctctctcacacacacacacacacacaca

SEQ ID NO: 404 - DNA, 131 bp, homo sapiens
gtaagtatatgtttattagccatattagaaacatgtaaatatatgtttattagccatattagaactagtttacccctttccctctaggatcttatagacacgtaagtatatgtttattagccatattagaa

SEQ ID NO: 405 - DNA, 108 bp, homo sapiens
tgcagacagccatcttctcattgaatcctcacccagcctttcctctctaccctgagacctctgtctttggcatgcagacagctatcttctcattgaatcctcacccag

SEQ ID NO: 406 - DNA, 90 bp, homo sapiens
tgtggacctttctaagatccctatctgattctctatcagtcatgttgtggacaagagaaacttatgtggaccttactaagatccctatct

SEQ ID NO: 407 - DNA, 186 bp, homo sapiens
agctagatacagagtgttgattggtgcattcacaaaccttgagctaaacacagggtgctgattggtgtgtttacaaaccttgagctagatacagagtgccgattggtgtatttacaatccctgaactagacataaaagttctccacgtcctcaccagagcagctagatacagagtgtcgattggtg

SEQ ID NO: 408 - DNA, 108 bp, homo sapiens
caccaatcggcactctgtatctagctcaaggtttgtaaacacaccaatcagcaccctgtgtctagctcagagtttgtgaatgcaccaatcgacactctgtatctagct

SEQ ID NO: 409 - DNA, 102 bp, homo sapiens
taaatcttgctaaatattgacagtgctaatatttaatactaaccagtattactaatattaatactaagatttaatataaatcttgctaaatactgacagtgc

SEQ ID NO: 410 - DNA, 80 bp, homo sapiens
gacaaataatgtattaagattcatatgtattgaatggttcagtatgaatgctcagagacaaataatgtattaagattcat

SEQ ID NO: 411 - DNA, 119 bp, homo sapiens
gattgaaccatgaagaaatagaaaacttcaacaaaccaataagaagttatgaaatcaaagctgtaataaaacagctcccatcaaagattgaaccatgaagaaatagaaaacctcaacaa

SEQ ID NO: 412 - DNA, 132 bp, homo sapiens
aaggtgagatttgggtggggacacagagccaaaccatatcagtatgtaactggtattctgagaaatttcccaaataaataattcaaggtgagatttgggtggggacacagagccaaaccatatcagtatgta

SEQ ID NO: 413 - DNA, 104 bp, homo sapiens
ttataaaccaggggcctaatacatacttaaatgtatacaatgtatacttatacgtatcacaaatacttatatgtattataaaccaggggcctaatatatactta

SEQ ID NO: 414 - DNA, 88 bp, homo sapiens
catgctttcagtttagacaatgctttcagtaataagataaagttttcagtattaagaaaaactacatgctttcagtttagacaatggt

SEQ ID NO: 415 - DNA, 105 bp, homo sapiens
gcctcccaaagtgctgggattacaggtgtgagccaccgcgcccggcctggaactcctgactttataatccacctgccttgcctcccaaagtgctgagattacagg

SEQ ID NO: 416 - DNA, 111 bp, homo sapiens
tcttgaactcctgacctcaggtgatctgccacacctggcaaatatttgtatttttagtagagatggtgtttgccaggtgagtcttgaacttctgacctcaggtgatctgcc

SEQ ID NO: 417 - DNA, 101 bp, homo sapiens
gtgaccaatcagaggctgaagtgaagttacatagttacaccctatgcaaacgtgtgattggttgcggaaagtgaccagtcagaggctgaagtgaagttaca

SEQ ID NO: 418 - DNA, 100 bp, homo sapiens
tgtgtgtgtgtgtatttaccatgaggcttactgatattgtgtatctactacagttgtgtgtgtgtgtgtgtgtgtgtgtatttaccatgaggcttactga

SEQ ID NO: 419 - DNA, 88 bp, homo sapiens
agggtaatcagaaactgcaggaaaaacagaacacttttttatgttcctacctcaaaaaacagggcaatcagaaactgcaggaaaaaca

SEQ ID NO: 420 - DNA, 147 bp, homo sapiens
aggtttcaactgcataagaactgtggtctccacagctccttatcttaagtctgatatgaaacatttacaacctattctctctgaagcctgctacctggaggtttcatctgcataagaactgtggtctccacagctccttatcttaag

SEQ ID NO: 421 - DNA, 126 bp, homo sapiens
ggcattctccatggaacaaacaattgaaaactagagtccaacagtagtcattttgtgatctagttaggatccaaacaaccacttacggcattctccatggaaaaaacaattgaaaactagagtcca

SEQ ID NO: 422 - DNA, 110 bp, homo sapiens
gaccttcgcggtgagtgttacagctcctaaggcagtgcatctggagttgttcattcctcccagtgggttcgtggtgaagctgcagaccttcgcggtgagtgttacagctc

SEQ ID NO: 423 - DNA, 103 bp, homo sapiens
gtattatactcttcatgtatattatttaatagtgttatacccttcatgtatattattaaaaaaacactattatttaatagtgttatacccttcacgtgttata

SEQ ID NO: 424 - DNA, 146 bp, homo sapiens
agagtggaatcccacactagaaattcataacaataagatgaatgctgtgctgatataccccttctccctggggaggtagggatccttagcttggattgaatttagagtggaatcccacactagaaattcataataataagatgaat

SEQ ID NO: 425 - DNA, 75 bp, homo sapiens
tatggacattttaacaatattgattattgaatctgtagactgctttgggtaatatggacattttaacaatattga

SEQ ID NO: 426 - DNA, 97 bp, homo sapiens
acatgtgcttatgtgccccttctgcatcacttaactttcttaaataatataaaatattggcagtagcttacatgtgcttatgtgccccttctgcatc

SEQ ID NO: 427 - DNA, 85 bp, homo sapiens
ggagttaagactgtattccctagagtattttttcataactcacttgctccaaaaatcacctgggagttaagactgtatcccctag

SEQ ID NO: 428 - DNA, 174 bp, homo sapiens
gtccattttacaaagggctgattggtccattttgacagggtgctgattggtgcatttacaatcctctagctagacacaaagtgctgattggtgcatttacaatcctctagctagacataaaagttctccaggtccccaccagattagctagacacagagtgctgattggtgcat

SEQ ID NO: 429 - DNA, 106 bp, homo sapiens
attgaataaattaagatcctcatttggatacatggcaaaggttttttggattgtgtaaagtttatattctgacataagaaattgaataaattaagatcctcatttg

SEQ ID NO: 430 - DNA, 77 bp, homo sapiens
ctcttaatagatgattttggtcctactatacttttctaccaagtataataataccttttaatagatgattttggtcc

SEQ ID NO: 431 - DNA, 122 bp, homo sapiens
catatcgctatcagcattttgggcaaagccattcacaacaagttcctcatctccatctgagaccacctcagcttggactttattgtccatattgctatcagcattttgggcaaagccattca

SEQ ID NO: 432 - DNA, 108 bp, homo sapiens
gatttaacattctgcttgaaaatatttaagaacactacggcctatatctataacataaaagtattttctgagatacgatttaacattctacttgaaaatatttaagaa

SEQ ID NO: 433 - DNA, 125 bp, homo sapiens
ataaatgtccatgaaatcttcacaatttatgttcagagactgcagtaaagacaggcataagaaattataaaagtattaatttgggaaactaataaatgtccatgaaatcctcacaatttatgttc

SEQ ID NO: 434 - DNA, 110 bp, homo sapiens
gtcctctttgtggtctaagaggaaaggcaaaggtgcaggtttttgagaaagcattggtaagggccactaaatctgaccttcctcagtcctctttgtggtctaggaggaaa

SEQ ID NO: 435 - DNA, 108 bp, homo sapiens
caccaatcggcactctgtatctagctcaaggtttgtaaacacaccaatcagcaccctgtgtctagctcagggtttgtgaatgcaccaatcgacactctgtatctagct

SEQ ID NO: 436 - DNA, 123 bp, homo sapiens
gatcagcagggtccagggaccgttgcgggttcttgggcaggggttgtttctgctgctgcatcagtgagtgcagctattccgatcagcagggtccagggaccgttgtgggttcttgggcagggg

SEQ ID NO: 437 - DNA, 110 bp, homo sapiens
tatattgaagcccgtccactgggtttgaatttttttaaaaacacaagtaccacatgcctctagttagctatatatattgaagcccctccactgggtttgaatttttttaa

SEQ ID NO: 438 - DNA, 140 bp, homo sapiens
ttctcttcttttttcttttctttctttctttttctctttctttctttctttctttccttccttcctccctccctcccttccttccttctttccttccttctttctttctttccttctttctttctttctttctttttttt

SEQ ID NO: 439 - DNA, 1186 bp, homo sapiens
ctcctcctcagctagctcctgctcgcgcctctcttcctcatgctcgcgcttcagccgctgctcgagcctctcttcctcctcctcgcgcttcagccgctgctcgcgcctttcctgctgctcgcgccttagttgctgctggcgcctctcctcctgctcctcgctcttcagcagctgctggcgcctctcttcctccggctcctcgcgcttcagccgctgctcgcgcctctcctcctgctcgagtctctccacctcctcgcgcttcagtcgctgctcgagcctctcttcctgctcgcgcttcagccgctgctggcgcctctcctcctcgcgcttcagcagctgatcgcgcctctcctcctgctcgcgcttcagccgctgctctcgcctctcctgctcgagcctcttctcctcctcgcgcttcagcagctgctcgcgcctctcctcctgctcgcgtcttagttgttgctcgctcctcaaccgctgctggagcctctcttcctcctcctggcgcttcagccgctgctcgcgcctctcctcttgctcccgccttagttgctgctcgcgcctctcctgctgctcgcgcctctcctcctcctcgagcttcagccaacgttcgcgcctctcctcctcctggtcgcgcttcagctgctgcttgcgcctctcctgctcgtgcctctccgtctcctcctcgcgcttcagccaatcgcgcctctcctcctgctcgcgcttcagccgctgctcgcgcctctcctgctcgtgcttctgctcgtgcctctcctcctcctgctcgcgcctcagctgctgctcgcgcctcagctgctgctcgcgcctcagctgctgctcgcgcctcagctgctgctcgcgcctcagctgctgctcgcgcctcagctgctgctcgcgcctcagctgctgctcgcgcctcagctgctgctcgcgcctcagctgctgctcgcgcctctcctcctcctgctcgcgcctcagctgctgctcgcgcctctcctcctcctgctcgcgcctcagctgctgctcgcgcctctcctcctgctcgcgcctcagctgctgctcgcgcctctcctcctgctgctcgcgcctctcctgctgctcgcgcctctcctcctgctgctcgcgcctctcctcctcctgcttgcgccttagttgctgctcgcgcctcagcctttgctgctgctgc

SEQ ID NO: 440 - DNA, 104 bp, homo sapiens
aaaagcagaaccactgataagggtctaacaaagatcacatgcttctgagggaacagggcaaagggcaaaagcagaaccactgataagggtccaacaaagatcac

SEQ ID NO: 441 - DNA, 139 bp, homo sapiens
tcatccgtccacccgccgactgctctctggggcacgcccatgccgcaactcatcaccatccactcatccgtccacccgccgactgctctctggtcatccgtccacccgccgactgctctctggggcacgcctatgccgc

SEQ ID NO: 442 - DNA, 78 bp, homo sapiens
tgaccccctgagttgacatctggggctcagaggtaaccctaaccgtaaccctttatgaccctctgagttgacatctgg

SEQ ID NO: 443 - DNA, 97 bp, homo sapiens
caactctggagcccaggctgttgcttctcagtctggtggtgaatcctctatagtcttatgagtgcggtgttcaactctggaacccaggctgttgctt

SEQ ID NO: 444 - DNA, 107 bp, homo sapiens
gggaaatatgagatcgcgttcaggtaactggaatcccatcagatgtaaggccatcaagtccgccgtgtggaggaatgtggggaaatatgagatcgtgttcaggtaac

SEQ ID NO: 445 - DNA, 109 bp, homo sapiens
tatattttattctaagagttgtatagttttcttatatctaggtccattttaaattaatttttgtatattatatgaaatttcatccattttaaattaatttttgtctatt

SEQ ID NO: 446 - DNA, 71 bp, homo sapiens
aaaatataaaatataaaagcaacaaatacaaagcaaaaaaaatacaaaaaaatacaaaatataaaagcaac

SEQ ID NO: 447 - DNA, 130 bp, homo sapiens
aaaagtattaatttggggaactaataaatgtccatgaaatcttcacaatttatgttcagagattgcagtaaagacaggcgtaagaaattataaaagtattaattttgggaactaataaatgtccatgaaa

SEQ ID NO: 448 - DNA, 78 bp, homo sapiens; identical to SEQ ID NO: 442

SEQ ID NO: 449 - DNA, 105 bp, homo sapiens
tgtgatctttgttggacccttatcagtggttctgcttttgcccttttccctgttccctcagaagcatgtgatctttgttagacccttatcagtggttctgctttt

SEQ ID NO: 450 - DNA, 100 bp, homo sapiens
cagaaccactgataagggtctaacaaagatcacatgcttctgagggaacagggcaaagggcaaaaccagaaccactgataagggtccaacaaagatcaca

SEQ ID NO: 451 - DNA, 79 bp, homo sapiens
atgaccccctgagttgacatctggggctcagatgtaaccctaactgtaaccctttatgaccctctgagttgacatctgg

SEQ ID NO: 452 - DNA, 110 bp, homo sapiens
gaccccggctgggccagcccgggctgcttaagtccctagtctcggccgggcacgaggacagcgcccgggagcgactgcagcctccgaccccggctgggccagcccgggct

SEQ ID NO: 453 - DNA, 158 bp, homo sapiens
caccaatcggcactctgtatctagctcaaggtttataaacacaccaatcagcaccctatgtctagctcaggggttgtgaatgcaccaatcgacactctgtatctagctactctggtggggactgggagaacctttgtgttgacactctgtatctagct

SEQ ID NO: 454 - DNA, 142 bp, homo sapiens
tcaaggtcatttgactccctttctagctgccctgcctgtctctctctctctctctctctctcacacacacacacgcacacatacacacacagtctttttcaaggtcatttgactccctttctagctgccctgcctgtttctc

SEQ ID NO: 455 - DNA, 175 bp, homo sapiens
ctgttgggggcgcagctgctgttcttccctctcctggcgtagctgttcctcctcgcggaattttctgtcagactcttggctgcgcagctgctgttcctccctctcctggcggagctgttcctcctcgcggaattttctgtcgcgctcctggcggcgcagctgctgttcttccctt

SEQ ID NO: 456 - DNA, 127 bp, homo sapiens
ctcctggcggcgcagctgctgttcgtcctccatgaattttctctcttgttcctggcggcgcactttctgttcctctaaacggaattttctgtcacgctcttggcggctcagctgctgttcctccctc

SEQ ID NO: 457 - DNA, 109 bp, homo sapiens
aacactaaaacattattgctgttgttatttaaagtagtattaactttatttaaagtagtgttactttagtaacactaaaacattattgctgttgttatttaaagtagta

SEQ ID NO: 458 - DNA, 92 bp, homo sapiens
aatagtataagatattaacaatacggaaaactgttaagatattaacaatagggaaaacaacagggaaaaaatagtgtaagatattaacaata

SEQ ID NO: 459 - DNA, 89 bp, homo sapiens
gtgctggtagtcagtggattggggtgtgtgtgtgtgtgtgtgtgtgtgtgtgtgtgtgtgtgtgtgtgctggtagtcagtggatggggg

SEQ ID NO: 460 - DNA, 91 bp, homo sapiens
agaggaggccctggagtgggtagtacctctctgctgctggtcatcccagtgtctgcagctctcagcagagaggaggccctggagttggtag

SEQ ID NO: 461 - DNA, 84 bp, homo sapiens
actaacctgtttttcattcagcaacaaattacagagtacctgctatgtgtaggccctggcactaacctgtttttcattcaacaa

SEQ ID NO: 462 - DNA, 150 bp, homo sapiens
agagaattaaaacattttggctgtgtatcagttgataaaactgctttgagatctgtctccattgtacttaaagattagactatcccaatgattacagagaattaaaacattttggctgtgtatcagttgataaaactgctttgagatctg

SEQ ID NO: 463 - DNA, 119 bp, homo sapiens
tatacgtatgaatatacagaatatatatcttctgtatatatagaatatacatcttatatataaatacatatctatatgttatagatacatatcttctgtatatatagaatatatatctt

SEQ ID NO: 464 - DNA, 126 bp, homo sapiens
cacaaattcctaaaccagcaatgctgcttggcaagactacacacacacgcacacacacacacacacactctcacaagacgcacaaattcctaaaccagcaatgctgcttggcaagacgacacacac

SEQ ID NO: 465 - DNA, 132 bp, homo sapiens
aatctgaatgtgagaaaaaaaggtcttcaaactgataatgacccgtcccccactgaatctgaatgtgagaaatgacccgtccccagctgaatctgaatgtgagataaaaaggtcttcaaactgataatgacc

SEQ ID NO: 466 - DNA, 102 bp, homo sapiens
ggtggctcatgcctgtaatcccaccatttgggaggccaaagcaggaggatcgtttaaagccaggagtttagccgggtgcggtggctcatgcctgtaatccca

SEQ ID NO: 467 - DNA, 145 bp, homo sapiens
atatttcctttccccagcctaccataaaagatggctggattttcctccttgcattaatattttgccttctggagaggaagtgtccagattggcatatttcctttccccagcctaccataaaacatggctggattttcctccttgc

SEQ ID NO: 468 - DNA, 103 bp, homo sapiens
caagagcgagactccatctcaatcaatcaatcaataagtaaaaagagttgagaaaaagtatataggctgggcctgggcgacaagagcgaaactccatctcaat

SEQ ID NO: 469 - DNA, 123 bp, homo sapiens
aaatgtccatgaaatcttcacaatttatgttcagagattacagtaaagacaggtgtaagaaattataaaagtattaatttagggaactaacaaatgtccatgaaatcttcacaatttatgttc

SEQ ID NO: 470 - DNA, 72 bp, homo sapiens
tagcgacttcattcttgcagtcaggctcccaacgactgcaagcgactcccagcgacttcattcttgcagtca

SEQ ID NO: 471 - DNA, 87 bp, homo sapiens
tgggagggaacacttttttctttctttctttctttctttttttttttctaccactatccacctggagagggaacacttttttctttc

SEQ ID NO: 472 - DNA, 75 bp, homo sapiens
ctgacctccataaactgtgagacaatgaaccacaggaaccaggtcctgggttctgacctccataaacggtgagac

SEQ ID NO: 473 - DNA, 109 bp, homo sapiens
tgattcattataatgctaattacctttgaaatatttcaaaaatgtttcaaatatttcaatcccttgctgtattgattcattataatgctaattacatttgaaatatttc

SEQ ID NO: 474 - DNA, 114 bp, homo sapiens
tggattcttccaaacccacatagaaaaagtactccaagccaatcttcttgatttgcttgatctcttgactgtttcctctgttggattcttccaaacccaaatagaaaaagtact

SEQ ID NO: 475 - DNA, 105 bp, homo sapiens
tgattggtgcattttacaaacctcttgctagctacagagcactgattggtgtgtttttacagagcattgattggtgcattttacaaaactcttgctagctacaga

SEQ ID NO: 476 - DNA, 75 bp, homo sapiens
tccccaccagattagctagatacagagtgtggacacaaaggttctccaagtccccaccagagtagctagatacag

SEQ ID NO: 477 - DNA, 117 bp, homo sapiens
agtgtgctcagagcatatacacccattgcttattattacttattaagtaattaataagtaataattacttattacttaataacgagtgtgctcagagcatatacacccattgcttat

SEQ ID NO: 478 - DNA, 74 bp, homo sapiens
atacataatataaattctttttgtggtcttctctaagaccacatttatattatacataatataaattcttttat

SEQ ID NO: 479 - DNA, 85 bp, homo sapiens
cctatacattgggggtctctttctggtctctactctgttttattcatcttaagtctaagtgtccatacattgggggtctctttct

SEQ ID NO: 480 - DNA, 125 bp, homo sapiens
ataagtgtccatgaaatcttcacaatttatgttcagagattgcagtaaagaaaggcataagaaattataaaagtattaatttggggaactaataaatgtccatgaaatcttcacaatttatgttc

SEQ ID NO: 481 - DNA, 212 bp, homo sapiens
cagcagaaaccttgtttttcttctccttagtcttttttcaaggttgcaagatgcaaccttgaagctttcagcagaaaccttgtttttcttctccttagtcttgtcctctttgtggtctaagaggaaagacaagggtgcaggttttcaagaatgcaccggtaagggccactaaatccgatcttcctcagtcctctttgtggtctaggaggaaa

SEQ ID NO: 482 - DNA, 90 bp, homo sapiens
ttgttaaatctgagttgatcagagtggtatgtggctcttcttccaccttttatatttctcttgttaaatctgagttgatcagagtggtat

SEQ ID NO: 483 - DNA, 101 bp, homo sapiens
cccagcactttgggaggccgaggcaggaggattgcttgagcccaggaattcgagaccatcctgggcaacatatcaagacccagcactttgggaggctgagg

SEQ ID NO: 484 - DNA, 117 bp, homo sapiens
tatcgccagagcttattctcacgatcatgtcaccaagtaatttactgagcatggccttcaagagaggaaattcttatatcgccagagcttattctcacgatcatgtcaccaagtaat

SEQ ID NO: 485 - DNA, 104 bp, homo sapiens
ggtgactttggaaaagtcactaatctgcctacctggtttttacagatactttgctacataagggaattggcaggtgactttggaaaagtcactaacctgcctac

SEQ ID NO: 486 - DNA, 87 bp, homo sapiens
gaagtatagaactgtagaaaaaaggaaaattactcagtgattcataaaagttttagaaatttaggaagtatagaacagtagaaaaaa

SEQ ID NO: 487 - DNA, 82 bp, homo sapiens
taacatctaaatacttaatatttacttacgtagtatttacttagtaattcttagtattaacatctaaatacttagtatttac

SEQ ID NO: 488 - DNA, 108 bp, homo sapiens
caccaatcggcactctgtatctagcttaagatttgtgaatacaccaatcagcacccagtgtctagctcagggtttgtgaatgcaccaatcgacactctgtatctagct

SEQ ID NO: 489 - DNA, 131 bp, homo sapiens
ggattacaattgaaggcaagatttgggtagggacacagacccaaaccatcctgatccaatcacctcctaccaggccacacctccaacacaggggattacaattgaaggcaagatttaggtagggacacaga

SEQ ID NO: 490 - DNA, 109 bp, homo sapiens
cagaataggagaaaatatttgcaaatcatataacatatacaggtctagtatctaggatatataaagagtgcaacctgcagaatgggagaaaatatttgcaaatcatata

SEQ ID NO: 491 - DNA, 79 bp, homo sapiens
aggaacccaaacccggttggaaaatacgtgggcctgtggcacaaggagagagaggaacccaaacccggttggaaaatac

SEQ ID NO: 492 - DNA, 90 bp, homo sapiens
agtagctgggattacaggcacctgccaccatcccagactaattttttatatttttagtagagtagctgggattacaggcacccgccacca

SEQ ID NO: 493 - DNA, 93 bp, homo sapiens
ttaatattgttaattacattttgttaattacatttaaaaattaacaaattaacaattaaaaattaacaaataaattttgttaattacatttaa

SEQ ID NO: 494 - DNA, 75 bp, homo sapiens
ccacccttgatatctgatcaccctggatatctgatcaaatttctcattcccccacccttgatatctgatcgccct

SEQ ID NO: 495 - DNA, 104 bp, homo sapiens
gttaatagaaattgacatatatatgtgtgtgtgtatacatacatatatatatatatatatatataaatatatataaatatatatatttatatatatatatatat

SEQ ID NO: 496 - DNA, 97 bp, homo sapiens
aaaattataggctggaaatggtgcaaatatgctatatatgtttatatgctgtatgggaagactgatttttttaaaattataggctagaaatggtgca

SEQ ID NO: 497 - DNA, 84 bp, homo sapiens
ctattaacaataaccacggctgggcgcgggggcttacacctgtgattccagattgtagtcctattaacaataaccaaggctggg

SEQ ID NO: 498 - DNA, 72 bp, homo sapiens
atatataacaattataaacatttgttttataattatatttttaaaataaaaatataacaattataaacattt

SEQ ID NO: 499 - DNA, 115 bp, homo sapiens
atcagctattcaattagagtgtggttgccttgcccctatgctaattgttccataccgttcatatggctaccatcagctattcaattagagtgtggttgccttgcccctgtgctaa

SEQ ID NO: 500 - DNA, 79 bp, homo sapiens
ttgagaatttggggtaaaaggaaggcagaagtgaagaaagttagtgatggacttgagaatttggggtaaaaggaaggca

SEQ ID NO: 501 - DNA, 78 bp, homo sapiens
tttaagctgatatatatatgtgtatatatatatggcgctctctctatatataagctgatgtatatttaaatatataag

SEQ ID NO: 502 - DNA, 105 bp, homo sapiens
ggtgtcaattttagatatttcccgctttcgaagttgtttgctcttacttctctaggtcctgtaattgtaatgttagggtgtcaattttagatctttcccgctttc

SEQ ID NO: 503 - DNA, 80 bp, homo sapiens
aaggatcaacctcctagcatttacttcctgataggggctttcatgaaacccaggaaggatcaatctcctagcatttactt

SEQ ID NO: 504 - DNA, 75 bp, homo sapiens
ggaaggagaaccagtgtcttggctaggaaggtcctcccagggcctcattccggaaggagaaccagtgtcttggct

SEQ ID NO: 505 - DNA, 158 bp, homo sapiens
caccaatcggcactctgtatctagctcaaggtttgtaaacacaccaatcagcaccttgtgtctagctcagggtttgtgaatgcaccaatcgacactctgtatctagctactctggtggtgacttgaagaacctttgtgtcaacactctgtatctagct

SEQ ID NO: 506 - DNA, 123 bp, homo sapiens
gatcagcagggtccagggactgttgcgggttcttgggcaggggttgtttctgctgctgcgtcggtgagcacaactattctgatcagcagggtccagggactgttgcaggttcttgggcagggg

SEQ ID NO: 507 - DNA, 138 bp, homo sapiens
taagtaatgataatgacaatatattgcatacttgaaaactgctaagttcaaccaatttctcaaacttccctgagcctcaaatttttcaactttaagtaatgataatgacaatatattgcatacttgaaaattgctaag

SEQ ID NO: 508 - DNA, 90 bp, homo sapiens
tctgtagctagcaagaggttgtaaaatgcaccaatcactgctctgtaaaaacgcaccagtgttctgtagctagcaagaggtttgtaaaat

SEQ ID NO: 509 - DNA, 110 bp, homo sapiens
tgcatcagtaagggccactaaatccaatttttctcagtcctctgtagtctaagaggaaaggcaagggtgcaggttttcaagagtgcatcagtaagggccactaaatccaa

SEQ ID NO: 510 - DNA, 75 bp, homo sapiens
aagtttactgacagaaataagtaaacttcatgaaaagtagaacatcgtggaagtttactgacaggaataagtaaa

SEQ ID NO: 511 - DNA, 107 bp, homo sapiens
agacttattcactaccatgagaacagtatggaatgaggaagatgcaaaaaccatgataaaaccattagatttcataagacttattcactaccatgagaacagtatgg

SEQ ID NO: 512 - DNA, 99 bp, homo sapiens
acaattactttaatgtaatttatatcttgttgacacagttactttaatgtaattttacattacatatctcattgatacagttactttaatgtgtacata

SEQ ID NO: 513 - DNA, 122 bp, homo sapiens
ataaatgtccatgaaatcttcacaatttatgttcagagattgcaataaagacaggtgtaagaaattataaaagtattaaattggggaaccaataaatgtccatgaaatcttcacaatttatg

SEQ ID NO: 514 - DNA, 150 bp, homo sapiens
tgtagagatgtttggttccagacacctagtggagatgtttaagaggttaatatgattgtaatgagttgtagggatgtttaagaggttaatgtgattgtaatgagttgtagagatgtttggttccagacacctagtggagatgttaagagt

SEQ ID NO: 515 - DNA, 104 bp, homo sapiens
gcatagatgttttaaatcacctctagatattttaaatcacctctagatacttatatggaaggatatgcatagatgttttaaatcatctctagatattttaaatc

SEQ ID NO: 516 - DNA, 116 bp, homo sapiens
ttgtgggttcttgggcaagaggtgtttctgctgctgtgtcggtgagctcaactattccaatcagcagagtccagggaccattgtgggttcttgggcaagaggtgtttctgttgctg

SEQ ID NO: 517 - DNA, 76 bp, homo sapiens
gagtggggagaaaaacctatgcttttctatggaagaaaagttattgtgtacgagtgggggagaaaaacctatgctt

SEQ ID NO: 518 - DNA, 103 bp, homo sapiens
ctcttttgtaaactacccaatcatatccttagcacacttttttattggggatttctgtcttcttgttgttgttgatttgctcttttgtaaattacccaatcat

SEQ ID NO: 519 - DNA, 93 bp, homo sapiens
ttgtactagacaaaagaaatttttacaaggtcatatttcttaaaattaacatgtaattgttgtactagacaaaagaaatttttacaagatcat

SEQ ID NO: 520 - DNA, 110 bp, homo sapiens
gtcctctttgtggtctaagaggaaaggcaagggtgcagatttttgagaatgcttcggtaagggccactgaatctgaccttcctcagtcctctttgtggtctaggaggaaa

SEQ ID NO: 521 - DNA, 85 bp, homo sapiens
gaacttctagaataacccagatgcgctttaattttttttaatatgttttgatcacagaacttctagaataacccagatgctcttt

SEQ ID NO: 522 - DNA, 96 bp, homo sapiens
ttggtgtgtttacaaaccattagctagacacagagcactgactggtgcgtttttacagagtgctgattggtgtgtttacaaacctttagctagaca

SEQ ID NO: 523 - DNA, 91 bp, homo sapiens
tataaaaagatgtaaattatgtatataataaggtataataatataataaggtataaaaagatgtatataaaaagatgtaaattatgatatc

SEQ ID NO: 524 - DNA, 345 bp, homo sapiens
gcagaggcgctcctcacttgccagacagtgcgggggccagggagaggcactcctcacttcccagagggtggcacggccaggcagaggcgctcctcagttttcagacggtgcagccgccaggcagaggtgctcctcacttcccagacaatgcaggggccggggagaggcgctgctcacttcccagcagaggctctcctcacttcccagatggtggggccgcctagcagaggcgctcctcatttttcagacggtgcggccgccaggcagaggcactcctcacttcccagacggagacagtgtgggggccggacaagggccgaacagaggcattcctcacttcccaga

SEQ ID NO: 525 - DNA, 118 bp, homo sapiens
gatttagtggtccttactgacgcattctcgaaaacctgcacccttgcctgtcctcctagaccacaaggaggaccgactgagaaaaatcagatttagtggcccttactgacgcattctc

SEQ ID NO: 526 - DNA, 88 bp, homo sapiens
aaggcatgacttagaggctccaggatgggccaatgggccactgagggtagcgagacttaaaggcatgatttagaggctccaggatggg

SEQ ID NO: 527 - DNA, 142 bp, homo sapiens
tcattggataccatactcattgtcatcgattcattcaaagaaaaacttggataccatactcattgtcttggtaccatactcattgtcattgattcattggataccatactcattgtcattgattcattcaaagaaaaacttg

SEQ ID NO: 528 - DNA, 87 bp, homo sapiens
aattatcaccctaaatcataagatacctggtaggtatcagatgtcaattatgagatcagacctcaattatcatcctaaatcataaga

SEQ ID NO: 529 - DNA, 105 bp, homo sapiens
tttttgagacaggagtcttgctatgttgcccaggctggactcgaactcctgtggctgaggccttatgcctcataatttttgagacaggggtcttgctatgttgcc

SEQ ID NO: 530 - DNA, 105 bp, homo sapiens
aatcagcactctgtaaaaatgcaccaatcagcactctgtgtctagctaaaggactgtaaatgcacaaatcagcactctgtaaaaatgcaccaatcagcactctgt

SEQ ID NO: 531 - DNA, 104 bp, homo sapiens
atcagcagggtccagggaccattgcgggttcttgggcaagaggtgtttctgctgctgagtcagtgagcacaactattctgatcagcagggtccagggaccgttg

SEQ ID NO: 532 - DNA, 83 bp, homo sapiens
acctcgaatcttcaaatcttagtgtagcaatttctactctgttttctcactctaaacctcgaatcttcaaatcttaatgtagc

SEQ ID NO: 533 - DNA, 84 bp, homo sapiens
atatattactaaatcagttacagaaaaagttatatatgaagcatattaataatgagtatatattattaaatcagttacagaaaa

SEQ ID NO: 534 - DNA, 192 bp, homo sapiens
aaacacaccaatcagcgctctgtgtctagctaaaggattgtaaatgcaccaatcagcactctgtgtctagctaaaggattgtaaatgcaccaatcagcactctgtctagctaaaggattgtaaacacaccaatcagcactctgtagaaatgcaccaatcagcactctgcgtctagctaaaggattgtaaatg

SEQ ID NO: 535 - DNA, 90 bp, homo sapiens
tttaagatgctttgtctgttgaggcctggactagatgatttctaaggtttttttttttttttaaattttaagatgctttgtctgttaggt

SEQ ID NO: 536 - DNA, 107 bp, homo sapiens
ttattggtctattcagggattcaacttcttcctgtttttttcagttggtaggctattaattattgcctcaatttcagaacccattattggtctagtcagggattcaa

SEQ ID NO: 537 - DNA, 96 bp, homo sapiens
aaagcaaccaatcagaggctgaagtgaaattacagaggtcatactcctgtgcaaacatccaattggttgcaaaaagcaaccaatcagaggctaagg

SEQ ID NO: 538 - DNA, 244 bp, homo sapiens
aatcagcgctctgtgtctagctaaaggtttgtaaacacaccaatcagcattctgtaaaaacacaccaatcagtgctctgtgtctagctaattggatggggacctggagaacttttctgtctagctaaaggattgtaaatgcaccaatcagcgctctgtgtctagctaaaggtttgtaaacacaccaatcagcactgtgtaaaaacacaaaaatcagcgctctgtgtctagctaaaggtttgtaa

SEQ ID NO: 539 - DNA, 81 bp, homo sapiens
gtgtatagaagtcaagggaaaagagtatgtatggaaaatgtgtgtatggagtgtagtgtatagaagtcaagggaaaagagt

SEQ ID NO: 540 - DNA, 111 bp, homo sapiens
actaatgttatcctttgttttacaaatgaggtgtcttacgccttatttgatcctcacaataattacatgaggtaggaaggactaatgttattctttgttttacaaatgagg

SEQ ID NO: 541 - DNA, 101 bp, homo sapiens
tataaatttgtattacttttgtataaatttgtattacttttgtaatacaaataaatcttgtactactttatacttctgtataaatttggattacttttgta

SEQ ID NO: 542 - DNA, 103 bp, homo sapiens
tgctgggattacaggtgtgagtcaccgcacacagccaactttttgtttgtttgtttgtttaaagagacagagttttgctgggattacaggtgtgagccaccgc

SEQ ID NO: 543 - DNA, 95 bp, homo sapiens
ccaatcagcgctctgtgtctagctaaaggattgtaaatgcacgaatcagccctctgtaaaaaaacaccaatcagcgctatgtgtctagctaaagg

SEQ ID NO: 544 - DNA, 108 bp, homo sapiens
caccaatcagcactctgtatctagctcaaggtttgtaaacacaccagtcagcactctgtgtctagctcaaggtttgtaaacataccaatcagcaccctgtgtctagct

SEQ ID NO: 545 - DNA, 85 bp, Homo sapiens
ttccaggatgcctaggcactagagagggaaagccctttatagagttcctctgtgtttccggctgccaggatgcctaggcactaga

SEQ ID NO: 546 - DNA, 82 bp, Homo sapiens
ggaaagggttaccgtcacgggcccacaggccctgtggccagagctgttccctgctgggaaagggttatcgtcacgggcccac

SEQ ID NO: 547 - DNA, 292 bp, Homo sapiens
cacccacatcctgctgattggtccattttacagagagctgattggtccgttttacagagaacttattggtccattttgacagagtgcagactggtgcatttacaatcctttagacacagagtgctgattggtgtgtttaaaatcctttagctagacacaaaagttctccaagtccccaccagattagctagacacagagcgctgattggtgcgtttagaaacctttagctagacacagagtgctgattggtgcgtttacaacatttagctagacatagagtgctgattggtg

SEQ ID NO: 548 - DNA, 90 bp, Homo sapiens
tttataagacaggtagaacctatgttttatgacaaattttaaagataatgtgaaatgttattttttataggacaggtagaacctatgttt

SEQ ID NO: 549 - DNA, 80 bp, Homo sapiens
attcacggccaggagcactgactgttcctgctcccacgtcacctgggtggtgtactgattcacggccaggagcattgact

SEQ ID NO: 550 - DNA, 94 bp, Homo sapiens
caaagaagacattgactcctgccagtatctgacaccccaactcaagttaatcagtcttatgcaaagaagacattggctcctgccagtatctgac

SEQ ID NO: 551 - DNA, 91 bp, Homo sapiens
gatgggatctcgctatattgtcccagcacacaccaccacacccaactaattttgtagttttctgtagggatgggatcttgctatattgtcc

SEQ ID NO: 552 - DNA, 112 bp, Homo sapiens
gccatgtcagccgtcggctgctctgaattcggattcactcattcccaccctggctaagatgggcaggtgttggccctgcttcgccatgtcagccgtcggctgttctgaattc

SEQ ID NO: 553 - DNA, 101 bp, Homo sapiens
ctgacactggccagtgctgggcagtgaagccaaaggccattccgcttgcccataggacagccttctgaggagctgctgacaccggccagtgctgggcagtg

SEQ ID NO: 554 - DNA, 81 bp, Homo sapiens
agtcatattctcttaaacagatattggagagggagagggagagggagagggccagagtcatattctcttaaacagatattg

SEQ ID NO: 555 - DNA, 82 bp, homo sapiens
caagtctctaggaagtttcaaacttccctacatcttcctgtcttctgagccctccaagtctctaggaagtttcaaactgtcc

SEQ ID NO: 556 - DNA, 99 bp, homo sapiens
aaaaattttactaatatatgtttttggcttttttttgttcatgatcctaaattttctagaactgttagatcatgtcaaaaactttactaatatatgttt

SEQ ID NO: 557 - DNA, 96 bp, homo sapiens
aaaacttgaatcttaaaaataatgataattatctgttatgcttcaaagcataacattcccaagtttattaaaaacttgaatcttaaaaatactgat

SEQ ID NO: 558 - DNA, 103 bp, homo sapiens
aggtctaccgttagaattcacagccaatatttaacttttgttgtggctgcatagtattccatggtgcataggtctactgttagaattcacagccaatatttaa

SEQ ID NO: 559 - DNA, 106 bp, homo sapiens
ggaggatcacttgagcccaggaattcaagcaggttgtggtgctacctgcctgtaatcccagctactctggaggctgaggcaggaggatcacttgagcccaggagtt

SEQ ID NO: 560 - DNA, 83 bp, homo sapiens
aactcctgggctcaagtgatcctctcacctcagcctctccactagctaggctggtctcaaactcctggcctcaagtgatcctc

SEQ ID NO: 561 - DNA, 63 bp, homo sapiens
ttgttggtgaactgattgttacacaaccaacctcacctcattgttggtgaactgattgttggt

SEQ ID NO: 562 - DNA, 87 bp, homo sapiens
gcacatgtatcccagaacttaaagtaaaatactataaaataaagatatgcacgttcagcacatgtatcccaaaacttaaagtaaaat

SEQ ID NO: 563 - DNA, 86 bp, homo sapiens
atataataaaaatatcaaaagactgtgatatcaaaagaatggaaacaaactaaataaagatataataaaaatatcaaaatactgtg

SEQ ID NO: 564 - DNA, 110 bp, homo sapiens
aaggggtttttgtacttttgtctttcttacattgaaggtagctccccaaattgtttcacgaccttcatttacattagcctctcctaaggggttttagtacttttgtcttt

SEQ ID NO: 565 - DNA, 132 bp, homo sapiens
aacataaattgtgaagattttatggacatttatcagttccccaaattaatacttttataatttcttacacctatctttactgcaatctctgaacataaattttgaagattttatggacatttatcagttccc

SEQ ID NO: 566 - DNA, 113 bp, homo sapiens
cccattttacagagagctgattggtccgttttacagagagctgattggtctgttttgacagggtgctgattggtacatttacaatctggctagacacagagtgctgattggtg

SEQ ID NO: 567 - DNA, 73 bp, homo sapiens
acttaaaagtttgtaagattatattgatacttatatagattatattgatacttaaaagtttataagattatat

SEQ ID NO: 568 - DNA, 165 bp, homo sapiens
aaaaaaatgccagagacagagaacaagaacaagaagaagaggaagaggcggaagagaaagaagaggaagaagaagaagaagaagaagaagaagaaggagaaggagaaggagaaggagaaggagaaggagaagaagaagaagaagaagaagaagaagaagaagaag

SEQ ID NO: 569 - DNA, 78 bp, homo sapiens
acatcttgattttagttcataagattttagttcataagtttttaagtttttagttcataagattttagttcataaaat

SEQ ID NO: 570 - DNA, 100 bp, homo sapiens
cactgtcttggttgaggagaagagaaggagttatgctaatacataattattgaggtggcttttgccttcaaggagcccactgtcttggttgaggagaata

SEQ ID NO: 571 - DNA, 101 bp, homo sapiens
tcataaccaatagaatatatatattcataaccaatagaatatatatatacacacacatacacatacacacattctatcataaccaatagaatatatatgta

SEQ ID NO: 572 - DNA, 73 bp, homo sapiens
ctttatatatctgggtgcttcagtgtttctttagctttaataacaccgtctttatatatctgggtcttcagta

SEQ ID NO: 573 - DNA, 100 bp, homo sapiens
ggaaaggattccctatttaataaccacacatctgcaatcatctgatctttgacaaacctgacaaaaacaagcaatggggaaaggattccctatttaataa

SEQ ID NO: 574 - DNA, 75 bp, homo sapiens
gtggggacttggagaacctttgtgttgacactctgtatctatctaatatagtggggacatggagaacctttgtgt

SEQ ID NO: 575 - DNA, 162 bp, homo sapiens
gttttttttttaaacttaaattctatgtagtcttatgttagtttagccattccaggataatgacatgtcattatcattataacatgtccttgtttatgcctagaaacaggttttttttttaacttaaattctatgtagtcttatgttagtttagccattcca

SEQ ID NO: 576 - DNA, 112 bp, homo sapiens
tcctcctagaccacaaggaggactgaggaatgtcagatttagtggccattactgacacattcttgaaaacctgcacctttgcttgtcctcctagaccacaaggaggactgag

SEQ ID NO: 577 - DNA, 113 bp, homo sapiens
ttttacagagcgctgattggtccattttacagagtgctgattggtccatttttacagagtgctgattggtgcgtttacaaatgtttagctagacacagagtgctgattggtgt

SEQ ID NO: 578 - DNA, 115 bp, homo sapiens
gatttcaagaaagttaatatgaacaattcaaagtaaaaatgtagtctactaaatatctttaaatgaaactctgcagtagcttggatttcaagaaagttaatatgaagaattcaaa

SEQ ID NO: 579 - DNA, 82 bp, homo sapiens
taaagcctgccaccagatgcagctgtacaattgaagtacatcaactcactggccactataaagcctgccaccagatgcagct

SEQ ID NO: 580 - DNA, 515 bp, homo sapiens
ttgtaaatacaccaatcagcactctgtatctagctcaaggtttgtaaacacaccaatcagcaccctgtgtctagctcagggtttgtggatgcaccagtcgtcactctttatctagctaatctggtggggacttggagaatctttatgtctggctaagggattgtgaatacaccaattggcactctgcatctagctaaaggtttgtaaatgcaccaatcagcactctgtgtctagctcaaagtttgtaaatgcaccaatctgcactctgtgtctagctgatctggtggggacttggagaacctttatgtctagctaagggattgtgaatacaccagtcagcactctgtatctagctcacagtttgtaaatgcaccaatcagcactctgtatctagctaatctagtggggaagtggagaacttttgtgtctagctcagggattgtaaatgcaccaatcagcaccctgtcaaaacggatcaatcagctctctgtaaaacagaccagtcggctctctgt

SEQ ID NO: 581 - DNA, 115 bp, homo sapiens
cctttgcttttttcttcctgtgtctcaatttttgtaaaactcctgtctctctttctttctttctttctttctttctttctttctttctttctttctttctttctttctttctttc

SEQ ID NO: 582 - DNA, 65 bp, homo sapiens
ctgattggtgcatttacaaatctttagctagacacagagtgctgactggtgcatttacaatcctt

SEQ ID NO: 583 - DNA, 79 bp, homo sapiens
taaaggcttatattaaagcctcttatactcgaatattatattatcctttataatataaaggcttatattaaagctcttt

SEQ ID NO: 584 - DNA, 85 bp, homo sapiens
ttttcagtcagaactcacagacctcagaataactcagcttacaggctattagtagccattttcagtcagaactcaccgacctcag

SEQ ID NO: 585 - DNA, 104 bp, homo sapiens
atagttgtgctttggtgatgctcttcttctggattgcagccagcatagttgtgctgccagccagcatagttgtgctttggtgatgttcttcttctggattgcag

SEQ ID NO: 586 - DNA, 78 bp, homo sapiens
caagtctctaggaagttccaaacattcccacatcttacctgtcttctgagccctccaagtctctgggaagttccaaac

SEQ ID NO: 587 - DNA, 63 bp, homo sapiens
agggacaatctgtctatctatctatctatctatctgcttatctatctatctatctatctatct

SEQ ID NO: 588 - DNA, 82 bp, homo sapiens
tgtcattactcaataagatattttcttcgaagcctttacattctgacaacatctagctgtcattactcaataacatattttc

SEQ ID NO: 589 - DNA, 109 bp, homo sapiens
taagaccaatttttataattaaaaagattacatctataaaataagaccaatttttataatttaaaagattacatctataaaataagaccgatttttataattaaaaaga

SEQ ID NO: 590 - DNA, 114 bp, homo sapiens
acataattttgcttttgagaagacataagaacacttgtatatagttttcaattatatttaacggcaacctaaacataattttgcttttgagaagacataagaacacttgtatat

SEQ ID NO: 591 - DNA, 132 bp, homo sapiens
attatacatatgaaagtattaatttgatatttaaaataaaatctaatggtttacctttgccttactcatgaaaataattaaacaaactattttgattatacatattaaagtattaatttgatatttaaaata

SEQ ID NO: 592 - DNA, 86 bp, homo sapiens
tattcatgtaattgtgtgtgtgtatatatatacacacacatatacatatacatcttcttattcatgtaattgtgtgtgtatatata

SEQ ID NO: 593 - DNA, 200 bp, homo sapiens
cccattttacagagagctgattggtccattttacagagagctgattggtccgttttgacagggtgctgattggtgcgtttataatccctgagctagacacagagtgctgattggtgcatttaaaatcctctagctagacataaaagttctccaagtcctcaccagattagctagatacagagtgctgattggtgcattta

SEQ ID NO: 594 - DNA, 192 bp, homo sapiens
agctagacacagagcactgattggtgcatttacaaaccttgagctagacacagggtgctgattggtgtgtttacaaaccttgagctagacacagagtgccaattggtatatttacaaatctttagctagacataaaagttctccaagtcctcaccagattagctagacacagagcactgattggtgcattta

SEQ ID NO: 595 - DNA, 94 bp, homo sapiens
tagtatagatacaaataaaacataaataagagacacttagccgaccccacctggtgctttgtttagtatagatacaaataaaatataaataaga

SEQ ID NO: 596 - DNA, 99 bp, homo sapiens
cttccaacaaggaaggcaagttttcctgcttccataatgatggaaggcagtgactcctttccggagtttgaactcgcttccaacagggaaggcaagttt

SEQ ID NO: 597 - DNA, 140 bp, homo sapiens
atgtacaagaaaagaaatatttttctatcaataaaatgtttagttagcaatatcactaatgcatatttctggatcttgctctcatcactgtggtaccacatgtacaagaaaagaaatatttttctataaataaaatgttt

SEQ ID NO: 598 - DNA, 95 bp, homo sapiens
tttagctagacacagagcactgattggtgcgtttttacagagtgctatttggtgcatttacaaatatttagctagacacagagcactgactggtg

SEQ ID NO: 599 - DNA, 125 bp, homo sapiens
ataaatgtccaggaaatcttcacaatttatgttcagagattgcagtaaagacaggcataagaaattataaaagtattaatttgggtaactaataaatgtccatgaaatcttcacaatttatgttc

SEQ ID NO: 600 - DNA, 77 bp, homo sapiens
ttcttgtcttctgagccctccaagtctctagattgttccaaacattcccacattttcctgtcttctgagccctccaa

SEQ ID NO: 601 - DNA, 112 bp, homo sapiens
ttgtatatctcttcagtgaaattactatacaagtctctttgtatagtaatatatatctctttgtatagtattgtatatctcttcagtgaaattactatacaagtcctttgtc

SEQ ID NO: 602 - DNA, 106 bp, homo sapiens
agaaactttagaatcagtttgttgatatccacagaattatctactctggggtcttttgtctttccacagaaacttttgaatcagtttgttgatatccacagaatta

SEQ ID NO: 603 - DNA, 88 bp, homo sapiens
caccagtatcagaatattctgaattgcttgaaaaaatcagaagcttttttccctataccaccagtatcagaattttctgaattgcttg

SEQ ID NO: 604 - DNA, 79 bp, homo sapiens
agcaaaagaaactgtcatcagagtgaatacacaacttaactaaatagcttgtgtatagcaaaagaaactatcatcagag

SEQ ID NO: 605 - DNA, 75 bp, homo sapiens
tgtatctagctactctggtggggacttggagaacctttgtgtccacactgtgtatctagctaatctggtggggac

SEQ ID NO: 606 - DNA, 106 bp, homo sapiens
gtgtgtgtctattgtaaatgtgattattgatttagttttcagtctgaactttattggcatatagtaatgctactgttattttgttgtgtctattgtaaatgtgatt

SEQ ID NO: 607 - DNA, 164 bp, homo sapiens
tgggtagctcctttctgcagacaggtcatcccaatgagtattcacttctcaatggagaggatgccagtttgggtagctcctttctgcagacaggtagtcctgacaagtgcagccctcaatggagaaaagatctggaggtgagttgctcttatctgcagggaggt

SEQ ID NO: 608 - DNA, 88 bp, homo sapiens
tttttttgtaagaaagataaccaatgctaaatgtgatctgttgatttggctacttgtttttttggtaagaaagataaccaatgctaaa

SEQ ID NO: 609 - DNA, 93 bp, homo sapiens
tttacaatcctctagctagacacagagcgctggttggtacgtttttatagagtgctgattggtgtgtttacaaacctttggctagacagagag

SEQ ID NO: 610 - DNA, 124 bp, homo sapiens
aatgtttatcctgaaactatgttcagtgataatgagaaaccaacacttggatcacagtgattaaggacacagtacgtatgcccggtacaatgttaatcctgaaactatgttcagtgataatgag

SEQ ID NO: 611 - DNA, 82 bp, homo sapiens
gttaggacaaatttcttatcagagaaatactttgattccagagcccttgctgaaatgttaggacaaatttctgatcagagaa

SEQ ID NO: 612 - DNA, 145 bp, homo sapiens
cagccaacatcatattgaatggacaaaggttggcaaaattcaccctaagaactggcacaagacagggatgtccactcatcactcctattcaacatggtactgcagccaacatcatattgaatggacagaggttggcaaaattcac

SEQ ID NO: 613 - DNA, 125 bp, homo sapiens
ataagtgtccatgaaatcttcacaatttatgttcagagattacagtaaagacaggcataagaaattataaaagtattaatttggggaactaataaatgtccatgaaatcttcacaatttatgttc

SEQ ID NO: 614 - DNA, 118 bp, homo sapiens
gctcccacatataagtgagaacatgcagtatttggttttctgttcctgtgttaatttgcttatgtacatgtgggctcagctttttgctcccacttataagtgagaacatgcagtattt

SEQ ID NO: 615 - DNA, 81 bp, homo sapiens
attagttttaagttaggaagtcttatttttattgagcataaaaatcatcattcaagagattagttttaagttaggaaggct

SEQ ID NO: 616 - DNA, 75 bp, homo sapiens
tatccttaggcttgcatagcataccttataaaaggctatttgaagttgtagttatccttaggcttgcataacata

SEQ ID NO: 617 - DNA, 105 bp, homo sapiens
tctctaagggtcttttctgatttcttttccaagagccacccacagttattgagtgaaagggaactgactttattctctaagggtcttttctgatttcttctccaa

SEQ ID NO: 618 - DNA, 87 bp, homo sapiens
gcagaactgtgaaagaaagttgggatttttaaaaaactgaagagaaagtagcagttgagcagaactctgaaagaaagttgggatttt

SEQ ID NO: 619 - DNA, 90 bp, homo sapiens
actctattcaaaacaccctcacagacacatctgggaatacatttaatctaatgctccctaaactctattcaaaacaccctcacagacaca

SEQ ID NO: 620 - DNA, 136 bp, homo sapiens
ttattgaacactcactataaagtacatttgttgaacaatatggctatctctctctatatatacatatatgcctctctctatatacaaatacttattgaacactcactatgaagtacatttgttgaacaatatggct

SEQ ID NO: 621 - DNA, 97 bp, homo sapiens
gtactaagcctagtacccattagctattgtgtcatgggggtttgttgtgcagattattttatcacccatgtactaagcctagtacccattagctatt

SEQ ID NO: 622 - DNA, 87 bp, homo sapiens
ttttatctctctgtatctgtctgcccatgtaaaaaataattcataaaaccatatatagccctcttttatctctctgtatctgtctac

SEQ ID NO: 623 - DNA, 136 bp, homo sapiens
ggaaagacaaactttgaatgttctcacttatttgtgggagcttatttgtggatggaaatggaggtcattatattaagtgaaataagccaggcatggaaagacaaactttgaatgttctcacttaattgtgggagct

SEQ ID NO: 624 - DNA, 74 bp, homo sapiens
tcaaccaaataaaagaaacatactggtcaccaccagtatttggtctgattctcaaccaaataaaagaaacatac

SEQ ID NO: 625 - DNA, 120 bp, homo sapiens
tttagttttactttaagtcaatgatatgaattagatagaattctaagtaaatgctatacccattttttccagaatggtttttgtttagttttactttaagtcaatgacatgaattagata

SEQ ID NO: 626 - DNA, 74 bp, homo sapiens; identical to SEQ ID NO: 624

SEQ ID NO: 627 - DNA, 120 bp, homo sapiens; identical to SEQ ID NO: 625

SEQ ID NO: 628 - DNA, 77 bp, homo sapiens
gagtcagttacccagttactctatgatttttcccttccccatcatacatatgagtcagttacccagttactctatga

SEQ ID NO: 629 - DNA, 89 bp, homo sapiens
aacatatacacatttgtaattcagatcagcagactgtaactcaatgatataaaaattaagagagataacatatacacatttgtaattaa

SEQ ID NO: 630 - DNA, 111 bp, homo sapiens
ataattaaaaatgttatctaaggctgagtactccagcctggggaacaaagtgagaccctatctcaaaactaaataaataaaataattaaaatgttatctaaggctgagtac

SEQ ID NO: 631 - DNA, 124 bp, homo sapiens
ataaacaaaatgtgatatatacatacaatggaatacctgtacacctgggcaacagaaagagaccccatctaaaaccaataagcttgtgaataaacaaaatgtgatatatacatacaatggaata

SEQ ID NO: 632 - DNA, 119 bp, homo sapiens
aaggtcttcaaacagtctatagcatatattaagcacacgagatggatgagtaatgtgacaattaagtgagttaatacattaaaggtcttcaaacagtctatagcatatagtaagcacac

SEQ ID NO: 633 - DNA, 98 bp, homo sapiens
tgctccaccgggctgagggccaagctgggagtccataaggaccccttcccacaggctgcagagcccctgctccaccaggctgagggccaagctgggag

SEQ ID NO: 634 - DNA, 105 bp, homo sapiens
tttttgtatttttagtagagacggggttttgggcgggtggatcacgaggtcaggagatcgagaccatcctagctaatttttgtatttttagtagagacggggttt

SEQ ID NO: 635 - DNA, 85 bp, homo sapiens
catgtgcatagttttatgtaccaaaactatggtacttaagtggttccatatagtgaagtcatgtgcatagttttctgtaccaaaa

SEQ ID NO: 636 - DNA, 79 bp, homo sapiens
ttccttcactcttttggatgattgaccaaaaagaccatccttcaaagagtgatgattccttcattcttttggatgattg

SEQ ID NO: 637 - DNA, 90 bp, homo sapiens
taaatatacaaaaagctaagatcttagaccagcctgaccaacatggagaaaccccgtctctactaaatatacaaaaagctaagatcttag

SEQ ID NO: 638 - DNA, 86 bp, homo sapiens
atgttacaaagtacgttcacaaggcggagggggagactgtattgtcacaagggcgggcaggagcgttacaaagcacattcacaagg

SEQ ID NO: 639 - DNA, 95 bp, homo sapiens
tgccaagcctggagcccctgtgttggggggcaaggtgggggagcctggagcccctgtgtgggagggcgaggcgggggagcctggagcccctgtgt

SEQ ID NO: 640 - DNA, 125 bp, homo sapiens
gaacataaattgtgaaaatttcatggacatttattagttcctcaaattaatacttttataatttcttacgcctgtctttactgcaatctctgaacataaattgtgaagatttcatggacatttat

SEQ ID NO: 641 - DNA, 97 bp, homo sapiens
gctgaggcaggagaatcgcttgaactcaggaggcagaggttgcagtgagctgagatcccagctactggggaggctgaggcaggagaatcacttgaac

SEQ ID NO: 642 - DNA, 109 bp, homo sapiens
gggctttggaggattttgacatcttctatcaagttgtcatttccatacacctggaggctgagtactctaaggggctttggaagattttgacatcttctatcaagttgtc

SEQ ID NO: 643 - DNA, 95 bp, homo sapiens
gaatcataaggcttttgttgaagaatcgatttgcatccccattgttcctatagataggatcactgacgttggaatcataaggcttttgtttaaga

SEQ ID NO: 644 - DNA, 76 bp, homo sapiens
cttccacagccatggggaatagctgagattaatgctattagctgagattaatgcttccacagccatggggaatagc

SEQ ID NO: 645 - DNA, 96 bp, homo sapiens
acacacacacaccaatcaccacactcagcctagctggagatatgggtgtaaggcagaattcatatacacacacacacatatatatacacacacaca

SEQ ID NO: 646 - DNA, 118 bp, homo sapiens
atgccacagggtgaggggtaatgtagcaccatagagaaacatacatacagggaatatggaataggatatgggaatgccacagggtgaggggtaatgtagcaccataaagaaacataca

SEQ ID NO: 647 - DNA, 94 bp, homo sapiens
gttaatctattatataatagattaacatattatgtaatatattatgttaatctattatataataggttaatctattatataatagattaacata

SEQ ID NO: 648 - DNA, 85 bp, homo sapiens
tctagtgcctaggcatcctggcagccggaaacacagaggaactctataaagggctttccctctctagtgcctaggcatcctggaa

SEQ ID NO: 649 - DNA, 96 bp, homo sapiens
ttcataataaaaatgaaaaatggcaacttccaacaaaaaaatagttattagttatcaactatgttattcataataaaaatgaaaaatggcaacttc

SEQ ID NO: 650 - DNA, 77 bp, homo sapiens
ggaagttccaagctttcccacatcttcctgtcttctgacctctccaagcctcttggaagttccaaactttcccacat

SEQ ID NO: 651 - DNA, 146 bp, homo sapiens
ggttatatgaaattttagaaagtcaaatcaatctgtagtaagagaaaaccacctgagttatttcctttatatgataggatataaacgaagtgattcgggttatatgaaattttagaaagtcagatcaatctgtagtaagagaaaac

SEQ ID NO: 652 - DNA, 78 bp, homo sapiens
caagttactgattcagtatgaatatagccctgggtggctccagggccccagaagcaagttattgattcagtatgaata

SEQ ID NO: 653 - DNA, 106 bp, homo sapiens
aatcttacatatttattcatttactaatagtcaattttaatatagtcaattatcttttaaagaagtttcttaaagaaagaaaatcttacatatttatccatttact

SEQ ID NO: 654 - DNA, 85 bp, homo sapiens
aaatgggagagaggatagaatggtgatgagagagagataaagaaatcaaaagataaagacaaatggaagagaggatagaatggtg

SEQ ID NO: 655 - DNA, 106 bp, homo sapiens
ttaataaagtagttgtgcttgtggagattgggatggaggtagaaatggcaaatttcattgcctactcatttactgatcttaataaagtagttgtgcttgtggagat

SEQ ID NO: 656 - DNA, 125 bp, homo sapiens
tagtatcatatggagtagttccatactccatatggatagtactccatatggagtagtatcatatggagtagtttcatatggtagatactatatgatattatagtatcatatggagtagtttcata

SEQ ID NO: 657 - DNA, 108 bp, homo sapiens
aggtgttcaatgaacacttattaaatttattcatcaacatatggtatttttcatagtatctaaaacacaggtgttcaatgaacacttattaaatttattcatcaacat

SEQ ID NO: 658 - DNA, 193 bp, homo sapiens
agaaatctaacaaagtatgtgtgggatttggaaactgacccaatctcctccctcacaaatgaaatacttaggtagaaatctaacaaagtatgtgtgggatttggaaactgacccactctcttccctcagaagtgaaatactctggtataaatctaacaaagtatgtgtgggatttggaaactgacccactgtc

SEQ ID NO: 659 - DNA, 108 bp, homo sapiens
agctagacacagagcgctgattggtgcatttacaaaccctgagctagacacagggtgctgattggtgtgtttacagaccttgagctagacacagagtgctgattggtg

SEQ ID NO: 660 - DNA, 119 bp, homo sapiens
tttataaacaatatactttataaacaatagacatttatttcttacagactgggtaatttaccacagactgggtaatttataaaactgggtaatttataaacaatagacatttatttctt

SEQ ID NO: 661 - DNA, 127 bp, homo sapiens
ctcacctcccggacggggcggctggccgggcgaggggctgacccccccacctcccttccggacggggcggctggccgggcggggggctgacccccacctccctcccagacggggtggctgccaggcg

SEQ ID NO: 662 - DNA, 107 bp, homo sapiens
ggtctcactctgtcactcaggctggagtgcgctggtgtgatcatagctcactgcagccttgaactcctggactcaagtggggtctcactctgtcactcaggctggag

SEQ ID NO: 663 - DNA, 105 bp, homo sapiens
tgcagcctcaaactcctgggctcaagcatctcactctgtcacccaggccggagtgcagtggcacgatcatagctcactgcagcctcaaactcctggactcaagca

SEQ ID NO: 664 - DNA, 158 bp, homo sapiens
agctagatacagagtgtggacacaaaggttctccaagcccccaccagagtagctagatacagagtgtcgattggtgcattcacaaaccctcagctagacacagggtgctgattggtgtgtttacaaaccttgagctagatacagagtgtcgattggtg

SEQ ID NO: 665 - DNA, 152 bp, homo sapiens
tgttttacatttaggtctatgattcacttcaagttaattttgtataattcaaatttatgaaaaatttcttttgtgttttcttttttcaaaatatttgtaattttgtgttttacatttagatctatgattcacttcaagttaattttgtataa

SEQ ID NO: 666 - DNA, 94 bp, homo sapiens
atatgagtaattatctaaaatgtttactatcatagaaactaaactgctttataggtagaataggaataatatgagtatttatctaaaatgttta

SEQ ID NO: 667 - DNA, 116 bp, homo sapiens
tgggatctaaaaatcaaaacaattaaactcatagacacagaggatagaaggatggttaccagagactgggaagggtgtgggatctaaaaatcaaaacaattaaactcatagacaca

SEQ ID NO: 668 - DNA, 90 bp, homo sapiens
atgtatcctaggcctcatcacttccagtcctatgtggcatttgttaaattatttaaaacatgtatcctaggcctcatcacttccagtcct

SEQ ID NO: 669 - DNA, 75 bp, homo sapiens
gttcctgccttaactgctgacattccaccatgaaagaagtgaaaatggcctgttcctgccttaactgatgacatt

SEQ ID NO: 670 - DNA, 75 bp, homo sapiens
gttcctgccttaactgctgacattccaccacgaaagaagtgaaaatggcctgttcctgccttaactgatgacatt

SEQ ID NO: 671 - DNA, 97 bp, homo sapiens
tccttcacccttagcgccaagtcccgctttcctggggcaggggcaagtacccctcaaccccttctccttcacccttagcggcaagtcccgctttcct

SEQ ID NO: 672 - DNA, 99 bp, homo sapiens
gtctcctctctgctgagagctgagcagatgttggttcaaacagctgtggagaggaaccacccactccagggtctcctctctgctgagagccgagcagat

SEQ ID NO: 673 - DNA, 114 bp, homo sapiens
aaatttcaggtaaaaacttttatgtaacttttatgtagtttatatgttttatagtaaacatactcttagtatattagagtattatataaatttcaggcaaaaacttttatgtaa

SEQ ID NO: 674 - DNA, 112 bp, homo sapiens
gcaagtgtataatttcagatctctgctgtaactgttacatggtttgacaatgttagaggaaaattaagaaatcacacaattctagcaagtgtgtaatttcagatctctgctg

SEQ ID NO: 675 - DNA, 158 bp, homo sapiens
ttctgaactatctacaccattaaagtaaaagcagagtttgggtagcagtaagtatagtgatctgataaatcacttgattttactatgtacaattcaaactgtaacagttctgaactatctacaccattaaactaaaagcagagtttgggtagcagtaa

SEQ ID NO: 676 - DNA, 81 bp, homo sapiens
ccactgcttcgccgggcatggtggctcacacctgtaatcccagcactttgggtggccactgcttcgctgggcatggtggct

SEQ ID NO: 677 - DNA, 156 bp, homo sapiens
atacttcaaccagaacagctaagtttttgttttatttattggggtttaattctggtagcactaagtgaagggggaaggaccagagggcctccagatccccttcacatacttcaaccagaacagctatgtttttgttttatttattggggtttaatt

SEQ ID NO: 678 - DNA, 182 bp, homo sapiens
gaggagtgaggagggaggcggggcattgaggattagtgaggacgtaggcggggtgctgaggggaggagggaggaggggcactgaggaagagggagcggaaaagagaggagggaggtggggcgctgaggggaagagagaggagggaggtggggcactgaggggaggagggaggagcgaggtgg

SEQ ID NO: 679 - DNA, 259 bp, homo sapiens
cctgccccagactaagcctggatcccgatttcagactaaggctggtgccacccaggctgattctagatgcctgccccagcctgagcctggatccccatcttagactaaggctggagcctacccaggctgaccctacatccctgccccagcctgagtctggatccctacctcagactaaggctagtgcccacttaagctgaccctagatcccgtctgctacttgagcccagatactcaccccaggctcagtctgggtccc

SEQ ID NO: 680 - DNA, 292 bp, homo sapiens; identical to SEQ ID NO: 547

SEQ ID NO: 681 - DNA, 81 bp, homo sapiens; identical to SEQ ID NO: 676

SEQ ID NO: 682 - DNA, 156 bp, homo sapiens; identical to SEQ ID NO: 677

SEQ ID NO: 683 - DNA, 157 bp, homo sapiens
ttttttaaataggctatttggcatttccttattaatttgcaagaattcaatgcatgctagattattaacttttttctgtaaattttcctttccatcttttgtccgttttttaaataggctatttggcatttccttattaatttgtaagaattcaatg

SEQ ID NO: 684 - DNA, 108 bp, homo sapiens
agctagatacagagtgtcgattggtgcattcagaaaccctgagctagacacagggtgctgattggtgtgtttacaaaccttgagctagatacagagtgccgattggtg

SEQ ID NO: 685 - DNA, 112 bp, homo sapiens
ccatttctccctcatcagccccagcaatcaccattcatcttgtgtgactaaaactctgtactcattgaacaaatcaccatttccccctcatcagccccagcaatcaccattc

SEQ ID NO: 686 - DNA, 82 bp, homo sapiens
agggaaggtcccacataagaaaaacacataaggcacagcttagcttagtgttgacatagggaaggccccacataagaaaaac

SEQ ID NO: 687 - DNA, 71 bp, homo sapiens
aataagaataatacctacctcttatttaaagtataataataataaaaaaaaaagaataatacctacctctt

SEQ ID NO: 688 - DNA, 74 bp, homo sapiens
ccccaccagattagctagatacagagggtccacacaaaggttctccaaggccccaccagagtagctagatacag

SEQ ID NO: 689 - DNA, 111 bp, homo sapiens
tgcttatttcaagcataactttcaaatgagacttgtgcgtactttttagcccaagtaattacctgtttttttcatgcttatttcaagcataactttcaaatgagacttgtg

SEQ ID NO: 690 - DNA, 108 bp, homo sapiens
gacaagataagagagggactggatgagtgggtctgatgtgcgacaagataagagagggactggatgaatgggtctgatatgcgacaagataagagagggattggatga

SEQ ID NO: 691 - DNA, 95 bp, homo sapiens
acccctcaaccccttctccttcacccttagcagcaagtcccgcttttctgggggaggggcaagtacccgtcaaccccttctccttcacccttagc

SEQ ID NO: 692 - DNA, 91 bp, homo sapiens
taagggtgaaggagaaggggttgaggggtacttgcccccctcctagaaaagtgggacttgccagtaagggtgaaggagaatgggttgaggg

SEQ ID NO: 693 - DNA, 158 bp, homo sapiens
caccaatcggcactctgtatctagctcaaggtttgtaaacacaccaatcagtaccctgtgtctagctcagggtttgtgaatgcaccaatcgacactctgtatctagctactctggtgggggcttggagaacctttgtgtggacactctgtatctagct

SEQ ID NO: 694 - DNA, 195 bp, homo sapiens
ttccaataacatcttataacccattatttcaaactgatgacaacttatatatacatatatacacacatatatatttccaataacatcttataacccattatttcaaactgatgacaacttatatatacatatatacacacatatatacttccaataacatcttatgacccattatttcaaactgatgacaactta

SEQ ID NO: 695 - DNA, 90 bp, homo sapiens
ataatcaatcatttcaactttagttaagctccctggccccactcccataatcatgtttaataatcaatcatttcaactttagttaagctc

SEQ ID NO: 696 - DNA, 64 bp, homo sapiens
taaagccattacatgttgatataagattttagaaatatttaatattcattacatattaataata

SEQ ID NO: 697 - DNA, 102 bp, homo sapiens
atattctcagctgtgcccaatgaaatacatttgttcctatatacaaaatttatttgtattaccaatatggcataagtatattctcagctgtgcccaacgaaa

SEQ ID NO: 698 - DNA, 132 bp, homo sapiens
aaaaaaaaattgtgaagcaaagtcacttgaatctagaaagacttttgtgtgagacatcctttaaggtgatgttagctttaaatgaaaaaaaaaattgtgaagcaaagtcacttgaatctagaaagacttttg

SEQ ID NO: 699 - DNA, 89 bp, homo sapiens
tagaatattttaacttactaaatgaatatttagaatgtacaatgaatgaatactaatgtagtattatagaatattttaacctactaaat

SEQ ID NO: 700 - DNA, 86 bp, homo sapiens
cagatccaggccctgacgctccctctgatcatgcgcttattaagagatggagccagggttcagatccaggccctgccgctccctct

SEQ ID NO: 701 - DNA, 129 bp, homo sapiens
gctcctttagggcaaggactatgatgttctcttgctttttgctttttcttcttgctttgttcatatttgtttcacctgcttacctggtaagctcctttagagcaaggactatgatgttctcttgctttt

SEQ ID NO: 702 - DNA, 85 bp, homo sapiens
cattgctacagttatctacaacttagattacttacttagagttacttaggtaactatacattgctacagttatatacaacttaga

SEQ ID NO: 703 - DNA, 107 bp, homo sapiens
tgttatcacagaaacttggaatgcagagaaatgttatcacagaaacttggaatgcagaaaaatttttgctttttaggggaggtgttatcacagaaacttggaataca

SEQ ID NO: 704 - DNA, 106 bp, homo sapiens
cacacaccaatgtgtgcacaaatacatgcacaaccatacatacacaccatacatacaacacacatacaccatacacacaacacacaccaatgtgtgcacaaataca

SEQ ID NO: 705 - DNA, 129 bp, homo sapiens
tcactatattatattacaaagcccttggaaagcaggggtcctattcagatattcagattttatcattattgtaacatttgagctcttctaccctcactatattatattacaaagtccttggaaagcagg

SEQ ID NO: 706 - DNA, 138 bp, homo sapiens
ccagaaaagtggtgcttgccactaagggtgaaggaccaaggcagaaaagagagggtagagacatggagagaaggggtcggggggtgcttgccccccagaaaagtggtgcttgccgctaagggtgaaggaccaaggcag

SEQ ID NO: 707 - DNA, 103 bp, homo sapiens
ctgtaacttatgaagaaatgccaataattttggcatttaagaagcatttttcctttcagaattaataaagcatttgttacctgtaacttatgaggaaatgcca

SEQ ID NO: 708 - DNA, 113 bp, homo sapiens
ctgagaaaggactaatatccagaatctacaatgaactcaaacaaatcagtaagaaaaaacaatcccatcaaaagtgggctgacaaaggactaatatccagaatctacaatgaa

SEQ ID NO: 709 - DNA, 106 bp, homo sapiens
caccagagtgggaagcaacagcctgggctccagaggtggataccacactcaccagactatggagggtttaacaccagagtgggaagcaacagcctgggttccagag

SEQ ID NO: 710 - DNA, 88 bp, homo sapiens
ttacaaacctctagctagccacagagcactgattggtgcatttttacagaacactggtgcattttacaaacctctaactagccacaga

SEQ ID NO: 711 - DNA, 95 bp, homo sapiens
tagtctcaaactcctgacctcaggtgatccgtccatgggttttctccatgttggccaggctagtctgaaactcctgacctcaggtgatccgtcca

SEQ ID NO: 712 - DNA, 95 bp, homo sapiens
ttctgagcaatgtcattctctttctttcactatcaccctattttactttttccctagattacttttctgagcaatgtcattctcttttttcactt

SEQ ID NO: 713 - DNA, 96 bp, homo sapiens
ccataccactggatggtatggtaataaataaaatccgtatcactggatggtatggtatggtaataaataaaatccataccattggatggtatggta

SEQ ID NO: 714 - DNA, 102 bp, homo sapiens
tgccagcctgaaagtcactctaaggcctcttcatggggctgggttgcctcatctccccggggctggcaggatgctcaatgccagcctgaaagttactctaag

SEQ ID NO: 715 - DNA, 103 bp, homo sapiens
aagagtacaactggattttttgtaacacaaaggaccaataataatttagttgtccattttgaaataactaagagtacaactggattttctgtaacacaaagga

SEQ ID NO: 716 - DNA, 89 bp, homo sapiens
ctctggagtagcttggactacaggcatgggctactacacacaatcctcccacctcagtctctggagtagctgggactacaggcatgggc

SEQ ID NO: 717 - DNA, 78 bp, homo sapiens
gtggggtctcctctgtccctgacccctcgctgttctcaggacttcacagtgtgggtggggtctcccctgtccctgacc

SEQ ID NO: 718 - DNA, 92 bp, homo sapiens
aaggcatttatccaaggaagagtcgtgactcacatatatttactcttcagggtcctctccatacaaggcatttatccaaggaatagtcgtga

SEQ ID NO: 719 - DNA, 1262 bp, homo sapiens
gtgagcccttgcctcacactggctcctcccacgctgagagaggtcagtgtgagcccttgcctcacaccggcccctcccgcgctgacagaggtcagcctgagcccctgcctcaacaggccaccgtgagggaggagcagggtcgcacgcgggctgctgggaggcaggcagggacttgggcctgggaggtcgctgtggggcgagagctgggcctggagacacccctgggaggcaacagcggggcctgcagacgctcttctccagccagagctgggactgttcaggctattggaggcgggatgtgggcctgagcgcttggttgcagaaacttcggggtcaacaaatgccggcgggagctgagccaaaagagcttgtttgctgagaggcaggagctgggccgggagatgcagccaggaggaacagctgggcctgcagaggccgccatgggggagacagaggccgggcctcctcaattcggcctctccagacccacttgcagcctcccggcgtcctctccgggcccagctcttcctcccggctgcgtctccaggcccgactctggcctcccaacaacgtctttggactcagctcctgcccagctcccagtggccctggtaggcccacaacttcccgaagccaagttccccaggcccaggtcaggcctcacggtggcctctccaggctcagctcctgccctccgatggcatctgcaggccccaaacggcctccggtcggtgggctcctctaggcccagcttgggcctcctggcggcctctgcaggcccaaatcgtcccgaagtcggcctctccaggcccagcttgggcctcccggcggcctctgcaggcccaagtcatcctcaaatcggcctggaattgggcctggaagagcagcaagtcggcctccccgggcccaactccgtcctctcggcggcctctccaggtgcaaaacttcctcgagtcagcctctccaggcccagctcctcctgcctcccagtggcctctttcggcccagcccagctcatggctctcggcggccttcccaggccccgcttttgacttttggcggcctcttcaggcccagaacttgacctccagtgggcctttgcaggcccggcctcctgcctctcgaaggcctgcacgggcccggcctcggcctcacagcggactctccacgcccagctagctctcgcctcactgcggcctccggagtccaaaactcctgcctctcggccgcttcagcaggtccagctcctgcctcccagtggc

SEQ ID NO: 720 - DNA, 85 bp, homo sapiens
gcctcccgaatagctgggattacaggtgtgtgctgggctcaagcaattctctcacctcagcctcccaaatagctgggattacagg

SEQ ID NO: 721 - DNA, 90 bp, homo sapiens
ctgcttttctggggaaggggcaagtaccccaaccccttatctctgtgtctctaccccttctctgcttttctgggggaggggcaagtaccc

SEQ ID NO: 722 - DNA, 75 bp, homo sapiens
ttcatagcacagttttatcctgccatcagagtaatcactagaccgggtatcctttatagcacagttttatcctgc

SEQ ID NO: 723 - DNA, 146 bp, homo sapiens
catccactcatccctccatccctctttcccttcacacttctctccatccacccacccaaccatccatccatccatccatccatccatccacccacacacccactcactcacccacccatccatccatccatccatccatccaaaca

SEQ ID NO: 724 - DNA, 158 bp, homo sapiens
caccaatcggcactctgtatctagctcaaggtttgtaaacacaccaatcagcaccctgtgtttagctcaaggtttgtgaatgcaccaatcgacactctgtatctagctgctctggtggggccttggagaacctgtgtgtcgaaactctgtatctaact

SEQ ID NO: 725 - DNA, 101 bp, homo sapiens
tctctgtggaagactctcttaatgctgtgagccccgcctgagctggtgctgtgtgataaactgacacctcccccttcatccctgtggaagactctcttaat

SEQ ID NO: 726 - DNA, 98 bp, homo sapiens
ttgattggaaggaagaagggaggttgaggagtgctcaccctgcactagttttatagtaggcatcattgattggaaggaagaagggagggtgaggagtg

SEQ ID NO: 727 - DNA, 96 bp, homo sapiens
tgcagagaccaacgctatctggcttgctgctgtattcctaacactcacctagtacaatgcctggtacataatgcagagaccaacactatctggctt

SEQ ID NO: 728 - DNA, 186 bp, homo sapiens
gggatggatgttacaaagtacattctcaaggagtcaagagcaattttgttttttgctggcaggggatggatgttacaaagtacattctcaagggctgggagaatattacaaagtacattcacaagggcagggagggtgtattgtcacaagggcgggggaggaatgttacaaagtacgttcacaagg

SEQ ID NO: 729 - DNA, 102 bp, homo sapiens
gtgtgtgtgtgagacagggaactcattctgttttttttttgtgtgtgtgtgtgtgtgtgtgtgtgtgtgtgtgtgtgtgtgagacagggaactcattctgtt

SEQ ID NO: 730 - DNA, 86 bp, homo sapiens
ggtagcaatggctggtaacaagtgatcaaagggggctccagattaaagggggctccaggaggtagcaatggctggtaacaagtgat

SEQ ID NO: 731 - DNA, 89 bp, homo sapiens
gccctggtgagtgaaggccacctgtcagctgagtaaggggacatgagccaccagcccccggccctggtgagtgaaggccacttgtcagc

SEQ ID NO: 732 - DNA, 145 bp, homo sapiens
agtattaattttgggaactgataagtgtccatgaaatcttcacaatttatgttcagagattgcagtacatacaggcatgagaaattataaaagtattaattttgggaactgataaatgtccatgaaatcttcacaatttatgttc

SEQ ID NO: 733 - DNA, 127 bp, homo sapiens
gtgggaaaaggggttggggcgcagagataagaggtcggggcgtggaaataagggattggggcgcagagatataagaggttggggcacagaaataagggattagggcacagagataagaggttggggc

SEQ ID NO: 734 - DNA, 114 bp, homo sapiens
atctctgacttatctcctcagaagaggaaagcagtggtcattcctaccaagatagaaatgacctgatctttataataatctctgacttatctcctcagaagagtaaagcagtgg

SEQ ID NO: 735 - DNA, 115 bp, homo sapiens
tccacaacttcagaggcacccaggaaggcccccacagttaacagacaccacggtcactgccaagtactgtagtgtatgcattccacaacttcagaggcacccaggaaggccccca

SEQ ID NO: 736 - DNA, 118 bp, homo sapiens
gggctctgagctgcagctgctttcctttccagacaggcctctctgacctgtcctactctgagcaaatgcctcggggctctgagctgcagctgctttcctttccagacaggcctctctg

SEQ ID NO: 737 - DNA, 89 bp, homo sapiens
tgctgattggtccgtttttacagcgtgctgacaggtgtgtttacaaatctttagctagacacagagtgctgattggtgcgtttttacag

SEQ ID NO: 738 - DNA, 100 bp, homo sapiens
ggtgatcacaccactgcactctagcactctgaggtggcaggacatcttgaacccaggaggctgcagtgagtgataggtgatcacaccactgcactctagc

SEQ ID NO: 739 - DNA, 157 bp, homo sapiens
ttgtaaatgcaccaatcagggctctgtgtctagctataggtttgtaaatgcaccaatcagcactctgtgtctagctaatcgggtagggtacttggagaacttttgtgtatagctaaaggattgtaaatgcaccaatcagcactctgtgtctagctaa

SEQ ID NO: 740 - DNA, 123 bp, homo sapiens
aaatgtccatgaaatcttcacagtttatgttcagagattgcaataaagacaggcgtaagaaattacaaaagtattaatttggagaactaataaatgtccatgaaatcttcacaatttatgttc

SEQ ID NO: 741 - DNA, 106 bp, homo sapiens
aataaaagaatactacacacttaccagaaaaggtactcaacatgttatttcattactgaattgcaaattaaaacaagaataaaataatactacacacttaccagaa

SEQ ID NO: 742 - DNA, 100 bp, homo sapiens
tgtgttccagagagttgagaagaggctaaatctcagcttatattagagctgtgttctttacatgattatgaacggctgtgttccagagagttgagaagag

SEQ ID NO: 743 - DNA, 95 bp, homo sapiens
ggccaagaatagagatggtcctttttaatgtgaactctgtatcctcagacttccagaaaccaggccaagaatagagatggtcctatttaatgtga

SEQ ID NO: 744 - DNA, 98 bp, homo sapiens
cttcccagaggcaggcctttaggatgctgagattgagcttctgttgtccagacaagctcatgcctctagaccctgcttcccagaggcaggcctttagg

SEQ ID NO: 745 - DNA, 82 bp, homo sapiens
cattggctgaaatgaagctgtcaccttccaatctcggaagggagagaaattcttggtgacattggctgaagtgaagctgtca

SEQ ID NO: 746 - DNA, 99 bp, homo sapiens
gataagttccatgtttacatggcttggtttgattaatgctttttctcctccaacagggagtaagtacccaaagataagttccatgtttacatgggttgg

SEQ ID NO: 747 - DNA, 106 bp, homo sapiens
ggtgaaaccccgtctctactaaaaatataaaaaattagccgggtgtggtggcgggtgcctgtaggctaacaaggtgaaaccccgtctctactaaaaatacaaaaaa

SEQ ID NO: 748 - DNA, 102 bp, homo sapiens
ggggcggggccggggggtaaatcactgggggggggtctggggggcgcggcgggggggagatcactggagggatctgcggggcggggccgggggggaaatcac

SEQ ID NO: 749 - DNA, 106 bp, homo sapiens
tgatttttaaaacaacaaaacagaggcacacctatacttactctaaacactagctgacattacttcaaaggatacaaactgatttttaaaacaacaaaagagaggc

SEQ ID NO: 750 - DNA, 100 bp, homo sapiens
aagaattggggctggacacagtagctctgtcttggaaaaaagctctgtcttgggaaaaaaaaaaaaaaagaagaagaattggggctggacacagtagctc

SEQ ID NO: 751 - DNA, 86 bp, homo sapiens
aacatttccttcagcaaacatgctcatcaacttctctggccctccatggctttaaggaaagaaaacatttccttcagcaaacacgc

SEQ ID NO: 752 - DNA, 129 bp, homo sapiens
tgtgtgtgtgtgtgtgtttacttggtgtttggggagtggggagggggtggctattggaagggcatattcctggcaacatggtttgtgtgtgtgtgtgtgtttacttggtgtttggggagtgggcagggg

SEQ ID NO: 753 - DNA, 91 bp, homo sapiens
caaaatgtatcatttaaatcattttaagtgtacaattcagtggggtgatatacataaggcaaaatgtattatttaaatcattttaagtgta

SEQ ID NO: 754 - DNA, 82 bp, homo sapiens
acatctaccatgctcagccttacagagatttttctagatgaatttgctttttctcacatctaccatgctcggccttacagag

SEQ ID NO: 755 - DNA, 107 bp, homo sapiens
catcacccttccatcagatcacagtgataataaggaccttcttcctttgctttctctgtgtcttccatccaacccaattcatcgcccttccatcagatcacagtgat

SEQ ID NO: 756 - DNA, 87 bp, homo sapiens
tggaaggctgtaaacatcccagagttcctgttggtacattgaattcattggttggtgacccggaagtgaccctataatggggaaagc

SEQ ID NO: 757 - DNA, 90 bp, homo sapiens
ttttaattagcacataattgtacatattatggggtagaatacgatatatggcacaaaattatttttaattggcacataattgtacatatt

SEQ ID NO: 758 - DNA, 77 bp, homo sapiens
gaacaatgctgtgtatttaaagagtagatttaaataagagtgtattgcttaggaacaatactgtgtatttaaagagt

SEQ ID NO: 759 - DNA, 84 bp, homo sapiens
ccccaaccccagcaaccactgattgctattcttttatagattacctcttgcttccatcccccaaccccagcaaccactgattgc

SEQ ID NO: 760 - DNA, 117 bp, homo sapiens
ctggtcagtacgtcaaggccatgagtgtcacgattttcttctaatttgcaacacatgcacccctccccaggtgcaggcccacctgccctggtcagtacctcaaggccatgagtgtca

SEQ ID NO: 761 - DNA, 98 bp, homo sapiens
cagagacaaaatgtgcaaaacttgaataaaaagaaagcagagacaaaatgtgcaaaacttgaataaaaagaaagcagagacaaaatgtgcaaaacttg

SEQ ID NO: 762 - DNA, 78 bp, homo sapiens
ccagcctgggcaacaaaatgagacccttctcaaaaaaacacaaacactgtatcccagcctgggcaacaaagtgagacc

SEQ ID NO: 763 - DNA, 97 bp, homo sapiens
gagtgagaccctatctcgaagtaaaataaaataaaacaaaaactctcactcccagtggtgcaatagagtgagaccctatctcaaagtaaaataaaat

SEQ ID NO: 764 - DNA, 92 bp, homo sapiens
ttttagcattagtcggtataatataaacgcttaggagaagaaaatcttaagagaaatacttttcttcattttagcattagtcagtataatat

SEQ ID NO: 765 - DNA, 77 bp, homo sapiens
atctccatcatcatagtgcctcatcccaggtgtaattgatgtcaccccaatatctccattatcatagtgcctcatcc

SEQ ID NO: 766 - DNA, 117 bp, homo sapiens
acacacacacacctgtggacatccaggatggagttacacaacacacacacacctgtggacatccaggatggagttacacacacacacacacacacacacacccctgtggacatccag

SEQ ID NO: 767 - DNA, 77 bp, homo sapiens; identical to SEQ ID NO: 765

SEQ ID NO: 768 - DNA, 117 bp, homo sapiens; identical to SEQ ID NO: 766

SEQ ID NO: 769 - DNA, 195 bp, homo sapiens
agctagacacagagcactgactggtgcatttacaattctttagctagacacaaaagttctccaagtccccactagattagctagacacagagcactgattggtgcatttacaaaccttgagctggacacagagcactgattggtgcgtttacaaaccttgagctagacacagggtgctgattggtgcatttacac

SEQ ID NO: 770 - DNA, 98 bp, homo sapiens
taatttattatattatattcccatgtaatatatttacagctggggattaataaattaattcccccataatttattatattatattcccatgtaatata

SEQ ID NO: 771 - DNA, 93 bp, homo sapiens
aagacacctataaatacagctattttttcaaaagcaaaaggacatatgaaaaccatgagtaaaatataataagacacctataaatacagctat

SEQ ID NO: 772 - DNA, 105 bp, homo sapiens
aaatatataaagtaaaaaatatacagtaaatatatatgtctaaagtatttatatatttatatatgtaaagtatttatataaatatataaagtaaaatatatacag

SEQ ID NO: 773 - DNA, 146 bp, homo sapiens
ttaaaacacggcagaatttctttaaattaaactcaattgaatttctttaatttttaaattaaactcagtttaaaacactgcagaatttctgtaatttaaaacactgcagaatttcagtttaagttaaaacactgcagactttctgt

SEQ ID NO: 774 - DNA, 146 bp, homo sapiens
cacagaattcagggaaacactttcacttatggtcattcattattataaaggatattacaaaggatacagatgaacagcctgaggtaagagatgcatagggtgacacagaattcagggaaacactttcacttatggtcatttattat

SEQ ID NO: 775 - DNA, 130 bp, homo sapiens
gagacagggttttgccatgttgggcaggctggtctcaaactctataggcacgcaccaccacgcctggctaatttttgtatttttagtagagacagggttttgccatgttgggcaggctggtctcgaactc

SEQ ID NO: 776 - DNA, 107 bp, homo sapiens
agaaggagaagataatcaagatcagctgtaaatctagttttccttcctctactgggccaggtgtggaggagagggagggacagaaggagaagataatcaaggtcagc

SEQ ID NO: 777 - DNA, 94 bp, homo sapiens
tttgagaaatgcctactcagatattatttttattattttattattttaataatcaggtattatcttctttgagaaatgccgactcagatattat

SEQ ID NO: 778 - DNA, 138 bp, homo sapiens
ctctctttcccatcttacaagacagcagatgaaacaattgagaagccagacacacacacacacacacacacacacacacacacacaaactctctttcccatcttacaagacagcaggtgaaacaattgagaagccaga

SEQ ID NO: 779 - DNA, 115 bp, homo sapiens
aaaatattattaaacaaaccaaaatttctgcaggctgggagccaccacacccagcctcaaattttattttttttttaaaatattattaaacaaaccaaaatttctgcaggctggg

SEQ ID NO: 780 - DNA, 148 bp, homo sapiens
acaaaattgctactcttccagagaccagatcaataaaatgtgtgcaaaataaaaaagcacatattcatcattcctgttagtagcaaccatcacactcactctaacaaaattgctactcttccagagaccagaccaataaaatgtgtgc

SEQ ID NO: 781 - DNA, 72 bp, homo sapiens
tatttcctgtacacacattcctttgtagctaatctattttctatttaaatatttcctgtacacacattcctt

SEQ ID NO: 782 - DNA, 108 bp, homo sapiens
aggagtgaagaggatagaaaagagacaggaataggggtacttctgaatttctgaggggtcctctcaagaaaaacttgcaagggaaggagtgaagaggatagaaaagag

SEQ ID NO: 783 - DNA, 106 bp, homo sapiens
tgagctagacacagagtgatgattggtgcatttacaatcctttagccagacacaaaagttctccaagtccctactagataagctagacacagagcactgattggtg

SEQ ID NO: 784 - DNA, 84 bp, homo sapiens
ccttctcccctgaagctggtcataaaacctaggaaggtcattctctgatattttcccacccttctcccctgaagcaggtcataa

SEQ ID NO: 785 - DNA, 138 bp, homo sapiens
aaaatataataagagataaggctaatttcctttaataataataataaaatcctttaataaaaatataaaggaataatataataattttctttattaaaatataataagagataaggctaatttcctttaataaaatac

SEQ ID NO: 786 - DNA, 90 bp, homo sapiens
taaagccattacatgttgatataatacaagatttttaaaatatttaatattcattacatattaataataaaaccattacatgttgatata

SEQ ID NO: 787 - DNA, 125 bp, homo sapiens
gaacataaattgtgaagatttcatggacatttattagttccccaaattaatacttctataatttcttaggcctgtctttactgcaatcgctgaacataaattgtgaagatttcatggacacttat

SEQ ID NO: 788 - DNA, 123 bp, homo sapiens
gaacataaattgtgaagatttcatggacatttattagttccccaaattaatacttttataatttcttatgcctgtctttactgaaatctctgaacataaattgtgaagatttcatggacattt

SEQ ID NO: 789 - DNA, 104 bp, homo sapiens
ctacaaagagattcctgatctaactctaggctgttcatgagtgttagacacacagtgtgagacagatcaccctacacagagattcctgatctaactctaggctg

SEQ ID NO: 790 - DNA, 75 bp, homo sapiens
gtaatcctagcactttgggaggctaaggcaggcagatcgcgagaggtcaggagtaatcccagcactttgggaggc

SEQ ID NO: 791 - DNA, 74 bp, homo sapiens
tcttaaaggactttaaagtcacaacttcaaaacacctggatatttctaaggtcttaaaggacattaaagtcaca

SEQ ID NO: 792 - DNA, 96 bp, homo sapiens
ctatcatggaggacctaaaagagatcagagagaaaagttttattctcggtttaccaagaatgacaattgtccctatcctggaggacctaaaagaga

SEQ ID NO: 793 - DNA, 91 bp, homo sapiens
tataattgttctttgattatatttgatcaaatatttgattatattgtttttattatcaaatatttgattatattgttctttgattatattt

SEQ ID NO: 794 - DNA, 103 bp, homo sapiens
tggcttcccttggctaggggagggataccatgggttccttatggaagaccagactgttcctcatggcacagtccctcgtggcttcccttggctaggggaggga

SEQ ID NO: 795 - DNA, 106 bp, homo sapiens
tcctatccttgactaaagtgctgggattacaagtgtgagccgccgcgcctggccttgttggtttttttcctatcctcctatccttgactaaagtgctgggattaca

SEQ ID NO: 796 - DNA, 109 bp, homo sapiens
ggcctcccaaagtgctgggattacaggcgtgagccaccacgcctggctcgaactcttgagctcaagtgatctgcctgccttggcctcccaaagtgctgagattacaggc

SEQ ID NO: 797 - DNA, 112 bp, homo sapiens
gggtgtttggtaggtggccttctgctgcgatgtgaggactcagactagagacctcaggttatttctcacttgggtctgtcatagggggtgtttggtaggtggccttccgctg

SEQ ID NO: 798 - DNA, 87 bp, homo sapiens
agtttcctcattccacctttatgtttttccttatgtctttataaaatctgtaagttagtttcctcattccacatttatgtttttcct

SEQ ID NO: 799 - DNA, 98 bp, homo sapiens
ttagtgctcacggcaatccagtagttattatagagcttttaaatacgtaagataatttcatacatattatctcatttagtgctcacagcaatccagta

SEQ ID NO: 800 - DNA, 74 bp, homo sapiens
ggggaataacagtcttggtggcattgggcaagccccgaggactccatctcggggaataacagtcttggtggcat

SEQ ID NO: 801 - DNA, 90 bp, homo sapiens
aaatgttttcctgttcaggtgacctagccccatacatactggtgaaccacaaacaattaaatgttttcctgttcaggtgacctagtccca

SEQ ID NO: 802 - DNA, 136 bp, homo sapiens
cctgagctggccgaccccaggatggatgtcctcttctcagatgagagagcccagagttcctgccgccttctccttcaccggcctccctgagctggccgaccccaggatggatgtcctcttctcagatgagagagcc

SEQ ID NO: 803 - DNA, 98 bp, homo sapiens
gctctgtagctagctagacgtttgtaaaatgcaccaatcagtgctctgtaaaaacgcaccaatcagcgctctgtagctagctagaggtttgtaaaatg

SEQ ID NO: 804 - DNA, 101 bp, homo sapiens
atgttcttacttatttgtggtatctaagaaaaatcacacgttcttatttatttacttatttattactaaaaaatcacatgttcttacttatttgtggtatc

SEQ ID NO: 805 - DNA, 98 bp, homo sapiens
ggcaatgcaacaatgggaaggagctaaaacgtaatgtaagtgacaatgcaacgtgaaggaatggaggcataaaggcaatgcaacaatgggaaggactg

SEQ ID NO: 806 - DNA, 97 bp, homo sapiens
atgcaagttctataatctctttgaacgtgagacctgtgtttggaaatctgacttctccagcgattacctgatgcaagttctagaatctctttgaacg

SEQ ID NO: 807 - DNA, 99 bp, homo sapiens
cccccagcattgggtgctgtcggtgtcgccagaggagtctccggggccccaggtcccccccccccccagcattgggtgctgtcggtgttgccagaggag

SEQ ID NO: 808 - DNA, 74 bp, homo sapiens
gacccttaacagtagttctgcttttgccctttgccttgggatctttgttggacccttatcagtagttctgcttt

SEQ ID NO: 809 - DNA, 110 bp, homo sapiens
tttctatagtgaggccgtactgaaagaatgtgatgtaaaaccgtcttagtggtaaacttattttccatctctctggttctttctatagtgaggcagtactgaaagaatgt

SEQ ID NO: 810 - DNA, 123 bp, homo sapiens
ataaatgtccatgaaatcttcacaatttatgtccagagattgcagtaaagacaggtgtaagaaattataaaagtattaatttggggaactaataaatgtccatgaaatcttcacagtttatgt

SEQ ID NO: 811 - DNA, 125 bp, homo sapiens
tccctgtacaaggctaatccccgcctgtgcacttaacgtagcatcattgttccatcccgaccttctttcctcctctctggatgatatgttccctgtacaaggctaatcccccgcctgtgcactta

SEQ ID NO: 812 - DNA, 104 bp, homo sapiens
ctcctttgttaaagcttgcgggttcctgagatgatggatgccaccctcggccactcctgagcacactcctttgttaaagcttgtgggttcctgagatgatggat

SEQ ID NO: 813 - DNA, 144 bp, homo sapiens
gagcccctgtcaagctgaatcctaacccaaggaggactgagggctgcgtagctttatattccacttttgaggtgggtgtcagctaaaagcttgctacagagctcctgtcaagctgaatcctaacccaaggaggactgagggctg

SEQ ID NO: 814 - DNA, 119 bp, homo sapiens
ccctagcttcactacctaatactactgaatcaagaatgacagaacctttagaatatttgggaagtattttaaatttgtgagtccctagcttcactacctaataccactgaatcaagaat

SEQ ID NO: 815 - DNA, 91 bp, homo sapiens
aggcttttcttcactggaagtcattatttgggtaccaggcttttcttcattattgggtatcaggcttttcttcactggaagtcattatttg

SEQ ID NO: 816 - DNA, 91 bp, homo sapiens
aggggtaatgccagcactcccttaatcacttttagaactacaaactctgcagcctgggtgtagggaggagtaatgccagcactcccttaat

SEQ ID NO: 817 - DNA, 114 bp, homo sapiens
cccctggccccccagacactctctttccattgtacctatagagcactatggcaagtccacccagagtcataagaaagcccccctggccccccagacactctctttccactgtac

SEQ ID NO: 818 - DNA, 85 bp, homo sapiens
cacacgtgtcccttcagggagggagaggaaggtcatgacctggctgcgctgctcgccccacacacgtgtcccttcacggagggag

SEQ ID NO: 819 - DNA, 125 bp, homo sapiens
attggatgagtctatatttcctttcagtggtgaaaggtgtgtgtgtgtgtgtgcgtgtgtgtgtgtgtgtagtctcgatgtatggtgggattggatgagtctatatttcttttcagtggtgaaag

SEQ ID NO: 820 - DNA, 118 bp, homo sapiens
ttgatcttactcgagaatggaaacattttccggggctgaagattccatatagcctttgttatgaatgttgcttctgttgatcttactcgagaatggaaacattttccggagctgaaga

SEQ ID NO: 821 - DNA, 107 bp, homo sapiens
cttagagaaatgcagccacctcataagtgccccccaacctctgtgcctcttccttctcacaacactctcacctcttagagaaatgcagccacctcacaagtgccccc

SEQ ID NO: 822 - DNA, 99 bp, homo sapiens
atgtgcacagtatcacactgtcatgaattatgaccaggattttcataagttctgtgttatattgctctggacatgtgcacagtatcacagtgtcatgaa

SEQ ID NO: 823 - DNA, 100 bp, homo sapiens
attacactgtgatactgtgcacatgcgcagagcaatatattgtaacacaaaattcttgaaaatcatggtcagattttatgacactgtgatactgtgcaca

SEQ ID NO: 824 - DNA, 113 bp, homo sapiens
tgggactcttcagacaatccaaacatccaatggccaatatcacctggatggccaaccacactggatggtcggatttcatcctgttgggactcttcagacaatccaaacatcca

SEQ ID NO: 825 - DNA, 97 bp, homo sapiens
gaaacagtgagttgaagtcagaggcgattcatcgtcagtataacacaggctgtgagtgtcacggtagagggagaaacagtgagttgaagtcagatgc

SEQ ID NO: 826 - DNA, 97 bp, homo sapiens
gcatctgacttcaactcactgtttctccctctaccgtgacactcacagcctgtgttatactgacgatgaatcgcctctgacttcaactcactgtttc

SEQ ID NO: 827 - DNA, 73 bp, homo sapiens; identical to SEQ ID NO: 374

SEQ ID NO: 828 - DNA, 511 bp, homo sapiens; identical to SEQ ID NO: 147

SEQ ID NO: 829 - DNA, 117 bp, homo sapiens; identical to SEQ ID NO: 234

SEQ ID NO: 830 - DNA, 92 bp, homo sapiens; identical to SEQ ID NO: 169

SEQ ID NO: 831 - DNA, 185 bp, homo sapiens
gacaccagcacacaggcggaaccagcacacaggaggaaccagcacacaggtggaaccagcacacaggcggaaccaggcgctgctccaagaagacacagtgtcgagagccaacaccagcacacaggtggaaccggcacacaggcggaaccagcacacaggcggaaccagcacacaggtggaaccag

SEQ ID NO: 832 - DNA, 107 bp, homo sapiens
ctgtccccagcacacactccctacacagataacactgacggttagctcctatccggggcttagcagcgctgtccccagcacacactccctacacagacaacactgac

SEQ ID NO: 833 - DNA, 79 bp, homo sapiens
aaagtttggaacttcctagagacttggagagctcagaagacaggaagatgtggaaaactttggaacttcctagagactt

SEQ ID NO: 834 - DNA, 96 bp, homo sapiens
cgtattgcatcctaatggcgtctttgtctcatacggctcacgtgttgtacagtgaggtggaatactgaccgtattgcatcctaatggcgtctttgt

SEQ ID NO: 835 - DNA, 86 bp, homo sapiens
gcccacacaaaggaaatgaccaacagagtgggattgcaccaaaccaaaacacttcggcccacacaaaggaaatgatcaacagagtg

SEQ ID NO: 836 - DNA, 84 bp, homo sapiens
cacctggggttggcatcttccagcagccagcctcacttgcctgctaagcatggtggcacctggggctggcatcttccagcagcc

SEQ ID NO: 837 - DNA, 97 bp, homo sapiens
tgagcatggggctcctgccttgctggcgctcacagctagtaatggtgggcagtgggtcaacacctcatgagcatggggctcccgccttgctggcgct

SEQ ID NO: 838 - DNA, 71 bp, homo sapiens
gacctgttctggtttgcactttccacctccaggggcctcacttcccctgaactgttctggtttgcactttc

SEQ ID NO: 839 - DNA, 78 bp, homo sapiens
tagtccttcaaatcattaagggctgacaagagcagatccactctttagcagccatagtccttcaaatcattaaggact

SEQ ID NO: 840 - DNA, 92 bp, homo sapiens
tgcacacttcatgtgaagctgctgaggcttttagccaggctgggtttatagaaaacacactggtgtgcacacttcatgtgaagctgctgagg

SEQ ID NO: 841 - DNA, 115 bp, homo sapiens
gtgatcctgggttggacgctggagtggaaagaatgacaaaaggtgaacaggttaaagagatgtgacagcacaaagccgtgtgatcctgggttggacgctggggtggaaagaatga

SEQ ID NO: 842 - DNA, 157 bp, homo sapiens
agctagatacagagtgtcgacacaaaggttctccaagtctccatcaggtagctagatacagagtgtcgattggtgcattcacaaaccctgagctagacacaggatgctgattggtgtgtttacaaaccttgagctagatacagagtgccgattggtg

SEQ ID NO: 843 - DNA, 123 bp, homo sapiens
cccccgcccccacgtcagtgagctgggcgctctccaagggctgcctcccccgcactgtgcatccctccaggatcacccccgcccacccccgcccccacgtcagtgagctgggcgctctccaag

SEQ ID NO: 844 - DNA, 105 bp, homo sapiens
ggagtttcatcagttctaaggagaaaattgttcctattgtcaggaaaatgggataccttaatgctcactggagtttcatcagttctaaagagaaaattgttccta

SEQ ID NO: 845 - DNA, 81 bp, homo sapiens
ggctgcctcttccctccagctgttcttcacgacacaacccagcctggtgcctgctcggctgcctcttccctccagctgttc

SEQ ID NO: 846 - DNA, 92 bp, homo sapiens
ccaggcttgccttgtaacttattatctgcgtgtatataggtttgttgtccataaaaagagtatatttcccaggctggccttgtaacttatta

SEQ ID NO: 847 - DNA, 102 bp, homo sapiens
caacatcaccaaggagcttatcacacctgcggcgtctggggccaccacaatccctgagtcagggctgcagcaacaacatcaccaaggagcttattacacctg

SEQ ID NO: 848 - DNA, 142 bp, homo sapiens
ctccccactcctgcctccttccggtcttctccccactcctgcctccttccggtcttctccccactcctgcctccttccggtcttctccccactcctgcctccttccggtcttctccccactcctgcctccttccggtctttt

SEQ ID NO: 849 - DNA, 158 bp, homo sapiens
gccaccgcgcccggccccttctgatcttcttaaacaagtttgaagctctccatttttccaggcgagtcctggctccccactcttgcctccttctgatcttctccccactcctgcctccttctgatcttctccccactcctgcctccttctgatcttct

SEQ ID NO: 850 - DNA, 94 bp, homo sapiens
gcaaacaatacagccctcacccagctgcccaatgtgtgcgtatgacacagacatagttttttccaggcaaacaatatagccctcacccagctgc

SEQ ID NO: 851 - DNA, 90 bp, homo sapiens
ggaggactccgcagtatcccggctgatgcatattgagtcatccagaggagagagagggggaggactccgcagtatcccggctgatgcata

SEQ ID NO: 852 - DNA, 76 bp, homo sapiens
gggggtcggagaaaagagcaaagggagactacaggtgaagaagtgggcctggggggtcggaaaaaagagcaaaggg

SEQ ID NO: 853 - DNA, 81 bp, homo sapiens
ttgaggagcaggcatgaagcgtggggaagattctgagctcgggctttgccctgattttgaggagcaggcatgaagcgtggg

SEQ ID NO: 854 - DNA, 87 bp, homo sapiens
gcccaggagacacaacccacagaccctcagtcatatccacaggaaacagagaacatgggctagcccaggagacacaaccacagacct

SEQ ID NO: 855 - DNA, 208 bp, homo sapiens
ggcccacccgactgcagaggccccttcttctaggattctccggcccacccaactgcagaggccccttcttctaggattctctggcccaaccgactgcagaggccccttcttctaggattctctggttttccggctgttcactatgctatgagaggtgggggctcagccggcccacccgactgcagaggcccctcattctaggattctc

SEQ ID NO: 856 - DNA, 137 bp, homo sapiens
cctccctggacccttccttgcatgtcacctgcagctagaggcttctctcgggtgctcatgtccctggggcttctctcacaatgcacctgcctccctggacccttccttgcatgtcacctgcagctcagaggcttctc

SEQ ID NO: 857 - DNA, 78 bp, homo sapiens
ggcatttcccggggtcccctgcccttgtcacaggccattcacatccacgagaaatggcatttcccagggtcccctgcc

SEQ ID NO: 858 - DNA, 108 bp, homo sapiens
ggccacaacctggtgcacagagtcctgtcccagggcaggggttcgagtccgtcctccgagcctctgcggccacaacctggtgcacagactcctgtcccagggcagggg

SEQ ID NO: 859 - DNA, 83 bp, homo sapiens
gcccacaggccaaatctgttctctaccgacgctgtaaataagggttgacaaacttaggcccacgggccaaatctgttctctac

SEQ ID NO: 860 - DNA, 125 bp, homo sapiens
agaccagctctctaggaaggatgcagggttcaggaaggtgcctgtggaataggttttagcaatgaagaggacagaaacaagagagaccagctctctaggaagggtgcagggttcaggaaggtgcc

SEQ ID NO: 861 - DNA, 117 bp, homo sapiens
gagtgttctgtaaacccagaccttttgctctgtgccagccttgcactcagcagacaacatggaagcctacgttcacattaatccaaagagtgttctgtaaacccagacctttcgctc

SEQ ID NO: 862 - DNA, 145 bp, homo sapiens
tctaagtgacagaggggcttcacaaaataccttccatacattatctgcatggtggatttcaagctaggtctcatcgaatttgctgtgttcctttaaccagatctaagtgacagaggggcttcacaaaataccttccatacattat

SEQ ID NO: 863 - DNA, 88 bp, homo sapiens
ccccatgctcaggttcagccaggcctgtctgccacctcccacgggctctcccacccccacccccatgctcaggttcagccaggcctgt

SEQ ID NO: 864 - DNA, 87 bp, homo sapiens
tattttgaagagataattttagagcccttatttaatagcctctgtgaattcagagggtatattttgaagagacaattttagagccct

SEQ ID NO: 865 - DNA, 102 bp, homo sapiens
ttccatggcaaatggttctctggcccatggggagccctcagtatctaccagagcccagtagcctgctaggggcttcttttccatggcgaatggttctctggc

SEQ ID NO: 866 - DNA, 103 bp, homo sapiens
aggagggtttgtggggggcttcctgcacctgacttgtctctcatgggcaccgcactgccgcctttagtctaggagggtttgtggggggcttcctgcacctgac

SEQ ID NO: 867 - DNA, 116 bp, homo sapiens
gcagtggggaaggccatggaagcaggaaggggccggctatctatctatctatagatatatacagagagagagagagaaagggaggagcagtggggaaggccatgaaagcaggaagg

SEQ ID NO: 868 - DNA, 123 bp, homo sapiens
acctcacagacagccggctctgtgcacctcacaacaggcccacatacttcccccatgctcaccatgctgttgcggggacagccccccgtacctcacagacagccggctctgcgcacctcacaa

SEQ ID NO: 869 - DNA, 94 bp, homo sapiens
atgcgaggaccatctctgaagccagagagagccacccctcaccagacacactctgttggcacctctatgcgaggaccgtctctgaagccagaga

SEQ ID NO: 870 - DNA, 90 bp, homo sapiens
atggcttcacatgatgagaagatgctagaaacgtggcatagggtctagggctttctgtgtatggcttcacataatgagaagatgctagaa

SEQ ID NO: 871 - DNA, 89 bp, homo sapiens
ctacgtgttgtaatgttcctctttctgtctattacaagagttgcgctcaaatggtgactacatgttgtaatgttcctctttctgtctat

SEQ ID NO: 872 - DNA, 82 bp, homo sapiens
atgtgggaaagtttggaacttcctagaggcttggaggactgagaagacaggaagatgtgggaaagtttggaacttcgtagag

SEQ ID NO: 873 - DNA, 92 bp, homo sapiens
tattttttggaggaatgaacttaaatgaacccatttgactctgggtattttttcatttggactaaaatgtattttttggaggaaagaactta

SEQ ID NO: 874 - DNA, 133 bp, homo sapiens
gaacataaattgtgaagatttcatggacatttatcagttccccaaattaatacttttataatttcttacacctgtctttactgcaatctctgaacataaattgtgaagatttcatggacatttatcacttccc

SEQ ID NO: 875 - DNA, 93 bp, homo sapiens
cagagaggcaaaaccatgagttgggtacccaagagaagtctcctggacccgagaaaaacaggacgcagagaggcaaaaccacgagttgggtac

SEQ ID NO: 876 - DNA, 150 bp, homo sapiens
ataccatttatttctttctcttctctgattgctttatctaggacttccagtactacactgaataacagtggtgaaagtgggcattctttttcaatgtggataccatttatttctttctcttctctgattgctttagctaggacttccagt

SEQ ID NO: 877 - DNA, 97 bp, homo sapiens
tctttcggcatcccttgcttccttgagacaacgacccccaccttcctacacttgtaagtttgcaactttctttcagcatcccttgcttccttgagac

SEQ ID NO: 878 - DNA, 113 bp, homo sapiens
tttccactgtttataatatgtaatgaacatgattgtacatagatttcgaaaaacaatcaaacaatacatttcatcggtttccaaattttccactgtttataacatgtaatgaa

SEQ ID NO: 879 - DNA, 80 bp, homo sapiens
aaggataaatctagcaccttcctctttaaggggaggtggagggatttagctcaagaaggataaatctagcacctccctct

SEQ ID NO: 880 - DNA, 94 bp, homo sapiens
aagctcagagagggtcaccagatggctctggaaataaagggcaatggtagcaagtgttgacacttgaggaaagctcagagagggtgaccagatg

SEQ ID NO: 881 - DNA, 148 bp, homo sapiens
agtactgccctctggaaggaaggcctctgtaagtactgccctctggaaggaaggcctctgtaagtactgccctctggaaggaaggcctctctgtaagtactgccctctgtaaggaaggcctctgtaagtactgccctctggaaggaag

SEQ ID NO: 882 - DNA, 79 bp, homo sapiens
attcaataaaaacattagctattattcaatagctaatgaaaatgaacgaaaacattcaataaaaacattagctattatt

SEQ ID NO: 883 - DNA, 120 bp, homo sapiens
gatttagtggcccttaccgacgcattctcaaaaacgtgcacccttgcctgtcctcctagaccacaaggaggaccgagaaaaattggatttagtggcccttaccgacacattctcaaaaac

SEQ ID NO: 884 - DNA, 91 bp, homo sapiens
ctggtatccaggctagaaataatgttctcttcatggaagttccatgatgtctcagtcctggctcctctggtatctaggctagaaataatgt

SEQ ID NO: 885 - DNA, 93 bp, homo sapiens
ggggaagtattgcacctgttcatggaacaggtgggatgaatgaactgaggaactggcctcagacccggggaagtattgcacctgttcatggaa

SEQ ID NO: 886 - DNA, 91 bp, homo sapiens
gcgattctatgaggctggagccaagacgagctgaagaagctggttgggaagaaagggaaggcgattctatgaggctggagccaagacgagc

SEQ ID NO: 887 - DNA, 91 bp, homo sapiens
acttccctgagcctccgcatcctcgtgggtcagagggcagaagcctggggacctctgcaggcatcttaacttccctgagcctccgtatcct

SEQ ID NO: 888 - DNA, 79 bp, homo sapiens
gggtccagtgacccggcatggagccagcaaacagaggaggcacctccaggctgcagggtccagtgacctggcatggagc

SEQ ID NO: 889 - DNA, 80 bp, homo sapiens
cagtggctggggatttggtttaacagcccataagttattccccatttatggtggcagtggctgaggatttggtttaacag

SEQ ID NO: 890 - DNA, 89 bp, homo sapiens
ggtttcaccatgttggccaggctggtctcaaactatttttttgtatttttagtagaggcgaggtttcaccatgttggccaggctggtct

SEQ ID NO: 891 - DNA, 139 bp, homo sapiens
gaacacataggatgagggatggataatagtaataataacgagcatgagggactctaaccaatgaccaacttttcttctgtcctcactcacgccctttgagaacacataggatgagggatggatgatagtaataataacg

SEQ ID NO: 892 - DNA, 131 bp, homo sapiens
tctttctgaaagcttctgcctccattgtggcattgtaaaagtgtcctggcttttttagggggaaagggaatgggtgtgatgctttctttctggaagcttctgcctccattgtggcattgtaaaagtgtcct

SEQ ID NO: 893 - DNA, 78 bp, homo sapiens
aaagtttggaacttcctagggacttagaaggctcagaagacaggaagatatggaaaagtttggaacttcctagagact

SEQ ID NO: 894 - DNA, 104 bp, homo sapiens
agtatataggatactattactaataggatatatattttacatatatacacacacatatatatatagtatgtatatctattagtatatagaatactattactaat

SEQ ID NO: 895 - DNA, 79 bp, homo sapiens
tgttggaagggctgtctttttttctgtaggctctgcaggagaatccaaaatcaagttgttggtagggctgtcttttttt

SEQ ID NO: 896 - DNA, 80 bp, homo sapiens
caagtctctaggaagttctaaacttcccaacattttcctgtcttcctctgagccctccaagtctctaggaagttccaaac

SEQ ID NO: 897 - DNA, 85 bp, homo sapiens
tggaatattattcagtgctaaaaaggtgaatggataaataaattgtgatatatccagacaatggagtattattcagtgctaaaaa

SEQ ID NO: 898 - DNA, 82 bp, homo sapiens
gtcatcgattgagcaagcaggaggtacatgattgggggctgcgcgtgagagggtggtcatcgattgagcaagcaggaggtac

SEQ ID NO: 899 - DNA, 105 bp, homo sapiens
aatgctgcctgcaccaggtatatgtattattattattattattattattattattattatattgcagttctcacatacaatgctgcctgcaccaggtataggtat

SEQ ID NO: 900 - DNA, 125 bp, homo sapiens
ataaatgtccatgaaatcttcacaatttatgttcagagattgcggttaagacaggcgtaagaaattataaaagtattaattttgggaactaataaatttccatgaaatcttcacaatttatgttc

SEQ ID NO: 901 - DNA, 91 bp, homo sapiens
tacaaaaataaatgaaatgtatagaccaatactgactattaaatatgtgcctatatttatatagatatacaaaaataaatgaagatgtata

SEQ ID NO: 902 - DNA, 125 bp, homo sapiens
taagttgtatttctgtgatgactaatgacaaggaattttttaataaattgtataaaaaattgttgtatttctgtgatgtataagttgtatttctgtgatgactaatgacaaggaatttttttaat

SEQ ID NO: 903 - DNA, 106 bp, homo sapiens
ggcatcttggggttagaagtgactttgacttccagcttaaatcagaggaattccagcttaaagctgaggaatcagacatggcatcttggggttagaagtgaatttg

SEQ ID NO: 904 - DNA, 127 bp, homo sapiens
ggaaaaataaaacaaccctccctgctgcacacctgttacttgcctctcgttggtttccatgctcccttttctcacttctggaaaaataaaacaaccctccctgatgcacacctgttacttgcctctc

SEQ ID NO: 905 - DNA, 91 bp, homo sapiens
ccccacccgcaaggcaggggtactaccactgccgacagaaactccccatcacatcctcaccctggccccacccgcaaggcggggtactaca

SEQ ID NO: 906 - DNA, 120 bp, homo sapiens
atctcatgttagatttattcttaggtatttaatgttttgatactattataaagttttccacttcattagtcctgcacatctcatgttagatttattcttaggtatttaatgtgttgatac

SEQ ID NO: 907 - DNA, 91 bp, homo sapiens
atttaatgagttttcttctataggcatattggtgagtagtcaccatgatgatgtatcatttcaaactgatttaatgagttttctcctatag

SEQ ID NO: 908 - DNA, 100 bp, homo sapiens
aagggcagggcagcattgcattctctctctctttttctctctttttctctctctctcgctctctctctaagggcagagcagcattgcattctctctctct

SEQ ID NO: 909 - DNA, 77 bp, homo sapiens
ttcctgtcttctgagccctccaagtctctagagagttccagactttcccacattttcctgtcttctgagccctccaa

SEQ ID NO: 910 - DNA, 112 bp, homo sapiens
caaatccagacatcatattatttatttttaaatatttctgcatatatatgtgagtgtgtctatatgtatatacaaacaaatccagacatcatattatttgtttttaaatatt

SEQ ID NO: 911 - DNA, 94 bp, homo sapiens
atatttttatataaagcagtttaaatgactttacagatcatttaatcatagtttataaatgatttaacatacttttatataaagcagtttaaat

SEQ ID NO: 912 - DNA, 138 bp, homo sapiens
ttctccctcagtgtgaagatacctttagtgtgctcttccactttggaaggccatgcaaggtgttccattataactctttttcctaagagttatattctccctcagtttgaagatacctttagtgtgctcttccacttt

SEQ ID NO: 913 - DNA, 111 bp, homo sapiens
acttctagaacattagacatttgaatcctatctctggctttatctcaaaatctaggtaactttaagcatatcactttgagtacttctagaagattagacatttgaatccta

SEQ ID NO: 914 - DNA, 78 bp, homo sapiens
aagtctctaggaagttccaaacttccccacatttttctgtgttctgagctctccaagtctctaggaagttccaaactt

SEQ ID NO: 915 - DNA, 99 bp, homo sapiens
gtgttagccaggatggtctcgatctcctgacctcgtgatctgcccgcctcgagagacagggtttcactgtgttagccaggatggtcacgatctcctgac

SEQ ID NO: 916 - DNA, 148 bp, homo sapiens
tatatgaatgtaaatatcttcctttatatattataaattttagtgtttgacttattgatacttaaatcaataatatatatacatatattatgtgtatatgaatgtaaatatcttcctttatatattataaattttagtgtttgactta

SEQ ID NO: 917 - DNA, 94 bp, homo sapiens
atactccatcttaacaagatcccaaagtgatactaatacagatactgatcagtgcatcagatactccatcttaacaagatcccagagtgatact

SEQ ID NO: 918 - DNA, 90 bp, homo sapiens
cctggcacctaccctcactcctagctcctctatcacctgctgtatgcacacaccatcatcctggcacctaccctcactcctcgctcctct

SEQ ID NO: 919 - DNA, 94 bp, homo sapiens
cccattccctaaaacctgctcctcgctatccctatataattttttttccaaagtgaacacctaaatttctcccattccctaaaacctgctcctc

SEQ ID NO: 920 - DNA, 102 bp, homo sapiens
tccatttatttcataaatctggccctttcaaaaactggacggaacttggaggacgatggtagattcccatcatatttccatttatttcataaatctggtcct

SEQ ID NO: 921 - DNA, 101 bp, homo sapiens
ggtttcgccatgttggccaggctggtctcgaactcctgacctcaggtgatccgcctttagtagagacaaggtttcaccatgttggccaggctggtctcgaa

SEQ ID NO: 922 - DNA, 73 bp, homo sapiens
tctggtggggacttggagaacctgtgtgtccacactctgtatctagctaatctggtggggacgtggagaacct

SEQ ID NO: 923 - DNA, 79 bp, homo sapiens
aagtttggaacttcctagagacttggagggctcagaagacaggaaaatatgggaaagtttggaacttcctagagacttg

SEQ ID NO: 924 - DNA, 87 bp, homo sapiens
ctttcctttttattttgagaaaggctgctgtttctttttttttctttctttcttttctttcctttcctttttattttgagaaaggct

SEQ ID NO: 925 - DNA, 71 bp, homo sapiens
ttctaaatttaagtccaaaaataatggctgacaagtttttaaagtaatttctaaattcaagtccaaaaata

SEQ ID NO: 926 - DNA, 114 bp, homo sapiens
tattccaacaaaactttgtttatggacagtgaaattgagttttatataattttcttgtctcacggtaagaaacaaatgagtgtgactattccaacaaaacttttttatggacat

SEQ ID NO: 927 - DNA, 99 bp, homo sapiens
ccttatttcctaaccattcctccttaattcctaaccgtaattcctacctaccttaattaaggtaggaattggcctaccttaattcctaaccattcctcc

SEQ ID NO: 928 - DNA, 99 bp, homo sapiens
aaactggatcgtggtaatggcggcacaactctataagggaatttggggaatgattagatgtccaaactggattgtggtaatggcggcacaactctataa

SEQ ID NO: 929 - DNA, 93 bp, homo sapiens
ggaggaggtaagacaggagagaacaggaagagaacagaggagtgggaagagggatggcaggaggaggtaagacaggagagaacaagaagagaa

SEQ ID NO: 930 - DNA, 87 bp, homo sapiens
agtctttaagcctgatgatcattatataaaatgttctattaaacatatataaagtctttttaagtctttaagccagatgatcattat

SEQ ID NO: 931 - DNA, 87 bp, homo sapiens
agaaatatatttaaatcatcacatacacacatatacacacaaacacatacatatatctagatatataaatatatttaaatcatcaca

SEQ ID NO: 932 - DNA, 87 bp, homo sapiens
gggttttgccatgttgcccaggccggtctcgaactgctgggtttttgtactttttgtagagatggggttttgccatgttgtccaggc

SEQ ID NO: 933 - DNA, 115 bp, homo sapiens
gagcgaaactccatctcaaaaaaaaaaaaaaaaagaaagaaaagaaaaaaagaaaaagaaaatgcgaggaaacgagcgaaactccatctcaaaaaaaaaaaaaaaaaaaagaaag

SEQ ID NO: 934 - DNA, 102 bp, homo sapiens
cccccctctccttcgaggtccccttgacaaggcagtgggtggcttctctgagatggggttgggggtttctggggactccccccctctccttcgaggtcccct

SEQ ID NO: 935 - DNA, 121 bp, homo sapiens
ttgcaacctaaaagctaacataatttccagccaaagaatttcttaggccctattgcctgtattaataatgttaatatacagtccttgcaacctaaaagctaacataattttcagccaaaga

SEQ ID NO: 936 - DNA, 96 bp, homo sapiens
cacgatgcacatatgcacaccacacatacgcatgcacgcacaaatgcacatacatcacatgcatgcacacacacatgcacatatgcacaccacaca

SEQ ID NO: 937 - DNA, 75 bp, homo sapiens
cccattccacctgagttactgagttggcaaagaaacaaattcttttcattcccattccacctgagttgctgagtt

SEQ ID NO: 938 - DNA, 105 bp, homo sapiens
gcagaaagctagcaaggggctgggcgtggtggctcatacctgtaatcccagcactttgggaggctgaggtgggcagaccttgcagaaagctagccaggggctggg

SEQ ID NO: 939 - DNA, 89 bp, homo sapiens
acttaaatttttgaaagaaacattatatcagcatcataaatagaaatatttacttacttttttaacttaaatttttgaaagaaagatta

SEQ ID NO: 940 - DNA, 98 bp, homo sapiens
acttaattttttgaaagaaacattatttcttacatttttacttgaagttttgaaatttacttaaatttattttacttaaatttttgaaagaaacatta

SEQ ID NO: 941 - DNA, 101 bp, homo sapiens
tcaagcagtcctctcacctcagcctcctaagtagctgtgtgtgtgtgtgtgtgtgtgcgtgcgcgcgcgcacgcactcaagcagtcctctcacctcagcct

SEQ ID NO: 942 - DNA, 79 bp, homo sapiens
ttgaatgctacttctctgggatccagatgcaaatgggagtgagcaagctgggcttgaatgctatttctctgggatccag

SEQ ID NO: 943 - DNA, 93 bp, homo sapiens
gctgctccaccaggcctccctgtgaggggctgagctagccctagaagccaggacccctggctccccagacgctgctccaccaggcctccctgc

SEQ ID NO: 944 - DNA, 104 bp, homo sapiens
ttagttgtgtaaatcagcctgttgctgataaacaaaaatttatattagtcctgggaccaacatttctttcagtatgacattagttgtgtaaatcagcctgttgc

SEQ ID NO: 945 - DNA, 109 bp, homo sapiens
ataacaatatgccttccttttccttttttattttatatataatatataatatagaagagtacctacttaagaagaataacaatatgccttccttttccttttttttttt

SEQ ID NO: 946 - DNA, 100 bp, homo sapiens
cttagctctgtctcctcgactcagtgagtccagactcttagctctgtctcttcaactcagcgagtccagactcttacttagctctgtctcctcaactcag

SEQ ID NO: 947 - DNA, 142 bp, homo sapiens
ggaaatgcctggatgtccaggcagaagttggctacaggggtgagcacagaagtcaagaatttaggtttgggaacctgcacctagatctcagaggatgtagggaaatgcctggatgtccaggcagaagtttgctacaggggtg

SEQ ID NO: 948 - DNA, 111 bp, homo sapiens
ggggcctgtagtcccagccagtcgggaggctgagacagaatacaaacaaaaaaattaaccaggcgtggtggcgggggcttgtagtcccagccagtcgggaggctgagacag

SEQ ID NO: 949 - DNA, 72 bp, homo sapiens
cctatgcaaatatgcaaagatataaatatatttattatacctttgcgaatatgcaaagatataaatatattt

SEQ ID NO: 950 - DNA, 96 bp, homo sapiens
tcaggcatcgaagacagaaattgtctaaataaaattttttctattcatagttttaaagggctaaagggtcaggcattgaagacagaaattgtctaa

SEQ ID NO: 951 - DNA, 88 bp, homo sapiens
ttttgtgtttttagtagagacggggtgtctactaaaaatacaaaccactgaacccagctaagttttgtatttttagtagagacggggt

SEQ ID NO: 952 - DNA, 106 bp, homo sapiens
aaaaaaaaaaaaatgtggaagataatttatcatactgcactccagtctgggtgacagagtgagactccatctcaaaaaaaaaaaaagtggaagataatttatcata

SEQ ID NO: 953 - DNA, 81 bp, homo sapiens
aaaaacaaggatttgatcaagctcagctttatgttcaaataatttaggatgttcatgaaaaacaaggatttgatcaagctc

SEQ ID NO: 954 - DNA, 135 bp, homo sapiens
gttcaataaactctctacattactctttttttttttttcttgagatggagtctcgctttgtcacctaggctagagtactgtgctcagaaatctccacgttcaataaactccctacattactcttttttttttttt

SEQ ID NO: 955 - DNA, 74 bp, homo sapiens
tctgtggagtagccattcttttattcctttactttcctaatcaacttgctttctttggagtagccattctttta

SEQ ID NO: 956 - DNA, 132 bp, homo sapiens
gaattatctcaaggctccactgaggcaggatttgcttttgagctcattcaggtcactgttggcacacctcaggtcctcgctggttcttggccggagaattatctcaaggctccactgaggcagaatttgctt

SEQ ID NO: 957 - DNA, 126 bp, homo sapiens
ttttagtagagacggggttttgctatgttggccaggatggtctagctgggattacaggcacccactaccatgcacagctaatttttgtcttcttttagtagagacggggttttgccatgttggcca

SEQ ID NO: 958 - DNA, 125 bp, homo sapiens
ataaatgtccatgaaatcttcacaatttatgttcagagattgcagtaaagacaggcgtaagagattataaaagtattaatttggggaactaataaatgtccatgaaatcttcacaatttatgttc

SEQ ID NO: 959 - DNA, 93 bp, homo sapiens
tttggaggctgggaagtccaagaccttagactgagtaatttataaacaacagaaatttactgctcatagttctggaggctgggaagtccaaga

SEQ ID NO: 960 - DNA, 84 bp, homo sapiens
acttttctggagggcaagaatcccctgaccccttctcttcgtgtctctaccccttctgcacttttctggagggcaagaaccccc

SEQ ID NO: 961 - DNA, 123 bp, homo sapiens
ctataattacccattaacagatatcactcaacatggtaacttaagaaagaaagaatagcatgcccttgtaaggccatgctttctataattacccattaacagatatcactcaacatggtaact

SEQ ID NO: 962 - DNA, 98 bp, homo sapiens
ctaataatgataatttgcactcccatctcgcttcctttcataattaataatattaataaaattacctaataatgataatttgcactcccatcttgctt

SEQ ID NO: 963 - DNA, 112 bp, homo sapiens
aaaaattgcaacattctcccaaattgacctatagattcagtgaaatccctatcaaaacttcctatattcatggatgaaatgttataaaaattgtaacattctcccaaattga

SEQ ID NO: 964 - DNA, 98 bp, homo sapiens
aaaattataaatctcctagaagaaaatatataaatatatatgtatataagacctcaatatgagaaaattataaatctcctagaaggaaatatataaat

SEQ ID NO: 965 - DNA, 83 bp, homo sapiens
ctatgttagaagccatagcagagtttttaatactttatgtattgttttcttttcctaacctatgttagaagctatagcagagt

SEQ ID NO: 966 - DNA, 114 bp, homo sapiens
agagtctaagatagttaaagtagctaggaaggaaggaaagaaaagaaaagaaaaaggaaaagaaaagaaaaaagaaaagaaaagaaaagagtctaagatagttaaagtagctag

SEQ ID NO: 967 - DNA, 91 bp, homo sapiens
ttttacccgtaagaaaaatctaaaaacattaagttttttagatttttaaaactttagtaaaataaagttttacccctaagaaaaatctaaa

SEQ ID NO: 968 - DNA, 72 bp, homo sapiens
tctagatagtatttaaaaccatgggattaggtgatatcaccaaaccacatctagatagtatttaaaaccatg

SEQ ID NO: 969 - DNA, 93 bp, homo sapiens
tacctattgaaatgtttgatttttcacaattagaaataatacttgggcaaagattataatttatttacctacctattgaactgtttgattttt

SEQ ID NO: 970 - DNA, 102 bp, homo sapiens
tgaattcctgatgttagtggaaatgcctctagagatgttgaatagtagtagatagagtggttatccttgttgaattcctgatgttagtggaaatgcctctag

SEQ ID NO: 971 - DNA, 80 bp, homo sapiens
ttacatagggcgcacaccaactaaatgacgttgtaactttacttcatcctcttcatttacatagggcgcacaccaagtaa

SEQ ID NO: 972 - DNA, 89 bp, homo sapiens
gacattgaataccaacgtcattttaaaaatcagcatcacaagtttcttcaaatgcatttgtgacactgaataccaacgtcattttaaaa

SEQ ID NO: 973 - DNA, 97 bp, homo sapiens
ccagggtctcctctttgctgagagctgaagagagatatgggacgaccagctgtggagaggagctacccactccagggtctcctctctgctgagagct

SEQ ID NO: 974 - DNA, 90 bp, homo sapiens
ttcaaaatacatgaagtaaaatttgacataagtaagggaaaaatgggtgattctaaaattatacttcaaaatacatgaagtaaaaattga

SEQ ID NO: 975 - DNA, 129 bp, homo sapiens
gttttgtgggaatttactgagcagcttctgggttgagggaaatcagaaatgaatattaagctggtcctcacctaagatctaaggtggttttgtgggaatttactgagcagcttctgggttgaggaaaat

SEQ ID NO: 976 - DNA, 96 bp, homo sapiens
caggagaaccagaatccatggataagagagaagaagcaggaaaaccagaatccattgattaagagagaagaagcagaagaaccagaatccatggat

SEQ ID NO: 977 - DNA, 76 bp, homo sapiens
ttcctaaataacttctcacatgcagcaaaccatgcagtcaaatttaatccatcttcctaaataacttctcacatgc

SEQ ID NO: 978 - DNA, 71 bp, homo sapiens
ttctggtcattaagaagcactagataaatatgacaactatttgaagttttctggtcataaagaagcactag

SEQ ID NO: 979 - DNA, 75 bp, homo sapiens
aaataagtatattaacatttactatcggcatttttctccatgcaaagatgaaagtaagtatattaacatttacta

SEQ ID NO: 980 - DNA, 102 bp, homo sapiens
ttagtagagacagggttttaccatgttggccaggctgccaccatgcccggctaatttttgtacttttagtagagacggggttttaccatgttggccaggctg

SEQ ID NO: 981 - DNA, 73 bp, homo sapiens
tttaggttgcttcttgactaaagcatacacacatatataatggaatattatttaggttgcttcttggctaaag

SEQ ID NO: 982 - DNA, 165 bp, homo sapiens
acaaggcacttcatggcttgtttctaattttctaccactttctctatgtcccatttatactgaaactacctgccatcccccatgtaaatcaaacttccttatacatacttaaacaaggcacttcatggcttgtttctaattttctaccactttctctatgtccca

SEQ ID NO: 983 - DNA, 122 bp, homo sapiens
ataaatgtccatgaaatcttcacaatttatgttcagagattgcagtaaagacaagcgtaagaaattataaaagtgttaatttggggaactaataaatgtccgtgaaatcttcacaatttatg

SEQ ID NO: 984 - DNA, 80 bp, homo sapiens
tctcttgaactcttgaaaatatcaaaaacatgaagctaaatgcagtaaagaattagtctcttgaactcttgaaaatatca

SEQ ID NO: 985 - DNA, 80 bp, homo sapiens; identical to SEQ ID NO: 984

SEQ ID NO: 986 - DNA, 123 bp, homo sapiens
tattggataatgttaaaatgttggtttcaaaatcacgtatggtccaagataccaagaaaaaaaaaaactgcctgtcaaatgtattggataatgttaagatgttggtttcaaaatcacgtatgg

SEQ ID NO: 987 - DNA, 110 bp, homo sapiens
gttcttgggcaagaggtatttctgctgctgtgtcagtgagtgcaactattctgatcagcagggtccagggaccattgcatgttcttgggcaagaggtgtttctgctgctg

SEQ ID NO: 988 - DNA, 90 bp, homo sapiens
catctgaccctcttgaggcactcaaaaagtaaggaaagctatatgtgatactgaccctgcagtcctcatctgaccctcttgaggcactca

SEQ ID NO: 989 - DNA, 84 bp, homo sapiens
gtgtgttttaagttaaacaacatacaagcaatacacgaatccattcttgtatatgtgtgcgtgtgtgttaagttaaacaacata

SEQ ID NO: 990 - DNA, 76 bp, homo sapiens
gtttatgagggtgtggtaaaaccagaaaacaatttaatgaggtaaaagccaatgtttatgagggtgtggtaaaacc

SEQ ID NO: 991 - DNA, 85 bp, homo sapiens
gaatccatccattataaaatccttcatcagcctctaatccttcatcagcgtggttggctgaatccatccattataaagtccttca

SEQ ID NO: 992 - DNA, 110 bp, homo sapiens
tttttatatacctctctcaattactgatagctcaagtcaggatgtaggttttttattattgctgatagacccagtaaggatttttatatacatctctcaattactgatag

SEQ ID NO: 993 - DNA, 102 bp, homo sapiens
aaaattcatactgtagctatgtcatagggctattttctttattttccctttcctccctcccttccttctttctatcctaaaattcatactgtagctatgtta

SEQ ID NO: 994 - DNA, 106 bp, homo sapiens
tagtatctcatttttcttaatagtaagtattggcttagtaatagtaatagtaataatagcttagtgatagtaagtaatggcttagtatctcatttttcttaatagt

SEQ ID NO: 995 - DNA, 116 bp, homo sapiens
taaccttagggatggatacagggaggttgctctgcttttctttaggaggcgaccctaataactagcagccttttcttggatgagtggtaacattagggatggatacagggaggttg

SEQ ID NO: 996 - DNA, 103 bp, homo sapiens
aaacaagggcaaataagatctctatccaacttttttaatataacgttttaaaaatgactgaaaaattatatataacaaacaagggcaaatgagatctctatcc

SEQ ID NO: 997 - DNA, 94 bp, homo sapiens
ggtgtggtggcacgtgcctgtagatctcaaaaaaaaaaaaaataaaaataaaaaaaaaaaaaattgagccaggtatggtggcacgtgcctgtag

SEQ ID NO: 998 - DNA, 111 bp, homo sapiens
aaacactttatattgcacagtaattgtgtaggcaaaatcaagtctttaattatttgaaatactctatagttatttgaaacactttatattgcacaataattgtgtaggcaa

SEQ ID NO: 999 - DNA, 109 bp, homo sapiens
atatgaatgcctagcccagtgtctgactacactatacctacaacatagagtggcttaaagactaaaggagaggatattcatatgaatgcctagcacagtgtctgactac

SEQ ID NO: 1000 - DNA, 81 bp, homo sapiens
cctgtattttctggtctgtagtatccaagggcagatgcctcatgaacagcctaatgctcctgtattatctggtctgtagta

SEQ ID NO: 1001 - DNA, 109 bp, homo sapiens
ctgtaatcccagcactttgggaggctgaggtgggcggatcacgaagtcaagagatcaagaccggctgggcacagtggctcatgcctgtaatcccagcactttgggaggc

SEQ ID NO: 1002 - DNA, 83 bp, homo sapiens
atataaatgagaggtaaaaataaaaactgattttcttttacataaatgagaggtaaaaataaaatgagaggtaaaaataaaaa

SEQ ID NO: 1003 - DNA, 96 bp, homo sapiens
gcaggcaggttgtcccaatgagtgtctagctctcagcagagaggagacccacagtgggtagcccctttctgcaggcaggttatcccaatgagtgtc

SEQ ID NO: 1004 - DNA, 104 bp, homo sapiens
caactattccgatcagcagggtccggggaccgttgcaggttcttgggcaggggttgtttctgctgctgcgtcagtgagcgcaactattccaatcagcagggtcc

SEQ ID NO: 1005 - DNA, 155 bp, homo sapiens
aatcccagcactttgggaggctgaggtgggcggatcacaaggtcaggagatcaagaccatcctggctaacatggtgaaaccctgtctacactaaaaatacaaaaatcccagcactttgggaggctgaggtgggcggatcacgaggtcaggagatc

SEQ ID NO: 1006 - DNA, 132 bp, homo sapiens
gagaatattacaaagtaccttcttaagggtgggggaatatcacaaagtacattatcacaagggtgggggaggatattaaaaagtaccttgttaaggttgtgggaatatcacaaagtacattatcgcaagggt

SEQ ID NO: 1007 - DNA, 102 bp, homo sapiens
aagatggcaccaagaagtgtttttttctttattattattattgttatttttaatgtatagccacacagacccaacagcaagaatggcaccaagaagtgtttt

SEQ ID NO: 1008 - DNA, 103 bp, homo sapiens
aattaaaatttttagaaaagcaacaaatagaaaataataacaatttaaaaataaaaataaaacctaaaaacaacaacaacaattaaaatttttagaaatgcaa

SEQ ID NO: 1009 - DNA, 80 bp, homo sapiens
atacatatgtattaactatttttttatatctgctttatatatacatatatatatatatatatatatatgtattaactatt

SEQ ID NO: 1010 - DNA, 84 bp, homo sapiens
tttcaggtactgaaatgtgtatttccgtacctgaatacaagacctccactttcaggtcatatttcaggtactgaaatatgtatt

SEQ ID NO: 1011 - DNA, 117 bp, homo sapiens
tcatttttctgtttctgagctcattgttagggttaaggtaggtttagggttagggtaagaaactggaatgaaacaattaacaatgagttcattattctgtttctgagctcattgtta

SEQ ID NO: 1012 - DNA, 129 bp, homo sapiens
atatgaaaaagtgttcaatatcacagatcatcggagaaatgcctgaatagacatttctcaaaagaagacatacaaatggcaaacaggtatatgaaaaagtgctcaatatcacagatcatcggagaaatg

SEQ ID NO: 1013 - DNA, 73 bp, homo sapiens
aaaaccagttttagaattccatcgccctcaaagatttcaacaatcaaaacaaaaccagttttataattccatc

SEQ ID NO: 1014 - DNA, 109 bp, homo sapiens
gtagtagcacctggcacacagtaattcccagtaagcatttgaaagttttttttttttttttttttttttttttggtggtgggggtagtagcacctggcacatagtaatt

SEQ ID NO: 1015 - DNA, 110 bp, homo sapiens
tgtgtacatttcagtaagatgaaaattgagcataccacaaacagaagacagaagtactcgggaactgtaaccctgtgtacatttcagtaagatcaaaattgagcatacca

SEQ ID NO: 1016 - DNA, 118 bp, homo sapiens
gctatagatagcacatttacatatatacatgtatatatagacatatacatatctatagatatgttcctatatagagatagttcttatggctatagatagcacatttacatacatacat

SEQ ID NO: 1017 - DNA, 95 bp, homo sapiens
atattattataaaatgattattcatctctttagtgtaatgaagtataatagtatacttagagcatattattataaaatgattatacatctcttta

SEQ ID NO: 1018 - DNA, 74 bp, homo sapiens
aatgtcatcagttaaggcaggaacaggccattttaacttcttttgtggtggaatgtcatcagttaaggcaggaa

SEQ ID NO: 1019 - DNA, 101 bp, homo sapiens
ttttttgtattgatcctaaaggcaatttcatttttaaatgaaaagagcattttaaaaagagcatttttttgtattgatcgtaaaggcaatttcatttttaa

SEQ ID NO: 1020 - DNA, 113 bp, homo sapiens
ttctcagatgcatagtttgcaaatattttttgatggttttttttgttgttgttgcgttccttgtagattctgggaattagtactttctcagatgcatagtttggaaatatttt

SEQ ID NO: 1021 - DNA, 87 bp, homo sapiens
catcccccaaatactgtattttccactgagttttgatgaaaaaaatccgtgtgtaactttcccatccccaaaatactgtattttcca

SEQ ID NO: 1022 - DNA, 116 bp, homo sapiens
caccaatcagcactctgtgtctagctcagggattgtaaacgcaccaatcagcaccctaccaaaacagaccaatcagctctctataaaacggaccaatcagctctctgtaaaatggg

SEQ ID NO: 1023 - DNA, 122 bp, homo sapiens
cctcacacaactacattttagaaagcaggaagcagggctgggagcagtggtgaattaacatgtggtatgtcataacaccctcacacatctacattttagaaagcaggaagcagggctgggag

SEQ ID NO: 1024 - DNA, 90 bp, homo sapiens
ctcaacttcccaggttcaagtggattctggagtgcagtggcgtgaccatgactcattgtcacctcaacttcccaggttcaagtggattct

SEQ ID NO: 1025 - DNA, 123 bp, homo sapiens
tagtttcctggcgttgccataacaaattaacaaactgggtggcggatcttaaagatcttttccaaattatactctcctagtttcgtggcgttgccataacaaattaacaaactgggtggcgga

SEQ ID NO: 1026 - DNA, 92 bp, homo sapiens
taccagatttagcaaataaaaatatagacaattgtctgaccagttgcttatatctggcttatgggtaccagacttagcaaataaaaatatag

SEQ ID NO: 1027 - DNA, 100 bp, homo sapiens
aaacaaactttatactgcaataacgtgcccatgtcatgcacttaaaaaagttctttttataagcatagattaaacaaactttatactgcaataatgtgcc

SEQ ID NO: 1028 - DNA, 106 bp, homo sapiens
cgagagactgacaaaaacccaatcaaacatacaaacagataaattagaatgtggtttatggagcttgcattctaacgagagactgacaaaaacacaatcaaacata

SEQ ID NO: 1029 - DNA, 72 bp, homo sapiens
taaagttgtgtctttactctttactttgctctttactacttctttactttaaagttgtgtttttactcttta

SEQ ID NO: 1030 - DNA, 89 bp, homo sapiens
atatggtttctgtcacttctcaactttgctgttttcatacttactatataaataaatagtttacatatggtttctgtcacttctcaact

SEQ ID NO: 1031 - DNA, 94 bp, homo sapiens
ccaaattagaatgaatcatccattttctatcctatctcctctgaagatcttccctgaatccccaaattagaatgaatcatccattttctatcct

SEQ ID NO: 1032 - DNA, 84 bp, homo sapiens
ttagaggatttgtaatgaatggaaatcttagcctccctatcatcagtattttaattattagaggattcgtaatgaatggaaatc

SEQ ID NO: 1033 - DNA, 87 bp, homo sapiens
ctgggttcaagcgatttccctgcctcacggtgagatcttgcctcactgcaacctccgcctcctgggttcaagcgatgtccctgcctc

SEQ ID NO: 1034 - DNA, 80 bp, homo sapiens
gagctttaattgactcacagttcagcatggctgagactaggtaatttataaaggaaggaggtttaattgactcacagttc

SEQ ID NO: 1035 - DNA, 75 bp, homo sapiens
gttcctgccttaactgatgacattccaccacaaaagaagcgaaaatggcctgttcttgccttaactgatgacatt

SEQ ID NO: 1036 - DNA, 120 bp, homo sapiens
aaataaaaaataaattagcagtttggcctgtatggcgccactgcactccagcctgggcgacagagcgagactccatctcaaaaaaaaaataaataaataaattagcagtttggcctgtat

SEQ ID NO: 1037 - DNA, 293 bp, homo sapiens
aagtgaggagcgtctctgcctggctgcccatcgtctgggatgtgaggagcccctctgcctggctgcccagtctggaaagtgaggagcgtctctgcccggccgccatcccacctgggaagtgaggagcgcctcctcccggccgccatcccatctaggaagtgaggagcgtctctgcccggcagcccatcgtctgagatgtggggagcgcctctgccccgccgccccgtccgggaggtgaggggcgcctctgcccggcggcccctactgggaagtgaggagcccctctggccggc

SEQ ID NO: 1038 - DNA, 82 bp, homo sapiens
ctgggattacaagctcctgctaccacggattctcctgcctcagcctcccgagtagctgggattacaggctcctgctaccacg

SEQ ID NO: 1039 - DNA, 106 bp, homo sapiens
gaattaaggttctgctacatctgtgtttagaatatttttttaaaactaaataagtgttggctagttttgcggtgtaagcagaattaaggttctgctacctctgtgt

SEQ ID NO: 1040 - DNA, 92 bp, homo sapiens
ggaatgcagtggtgcaatcatagctcacagtctctctctgttgctgaggctggaatgcagtggcggaatgcagtggtgcgatcatagctcac

SEQ ID NO: 1041 - DNA, 82 bp, homo sapiens
tgtcaacagcagaaccacactaaacacacacacacaaaaaaatgctaagagaaaaaactgtcaacagcagaaccacactaaa

SEQ ID NO: 1042 - DNA, 97 bp, homo sapiens
tgtgctgggattacaggcgtgagccaccgcgcccggccacaagcaatcttcttgctttggcctttcaatgtgttgggattacaggcgtgagccaccg

SEQ ID NO: 1043 - DNA, 122 bp, homo sapiens
aaaaatacaaaaattagccaggcatggtggcaggcgcctgtaaacccagctactcgggaggctgaggcaggagaattgcttgaacttacaaaaaatacaaaaattagccgggcatggtggca

SEQ ID NO: 1044 - DNA, 83 bp, homo sapiens
gaaggctcattcctagagttgtctgatttggtcatttggcaaggtcccacagcactaggaaggctcattcctagagtagtctg

SEQ ID NO: 1045 - DNA, 84 bp, homo sapiens
aaatattactctaatttactccaattatcaccaaaataattagataatatgtaaattatctaaatattactctaatttcctcca

SEQ ID NO: 1046 - DNA, 77 bp, homo sapiens
accctgataaacccattgtaagtaaaaaatattgaagtaaaaaatgcatctgataccctgataaacccattgtaaag

SEQ ID NO: 1047 - DNA, 82 bp, homo sapiens
ggaggttgcagtgagccaagatctcgcctctgcactccaatcacttaaacccaggaggcggaggttgcagtgagccaaggtc

SEQ ID NO: 1048 - DNA, 77 bp, homo sapiens
ttcaagaatgtaatataaatggaaccatatagtattatttcaggaatttatacttcaagaatgtaatataaattgaa

SEQ ID NO: 1049 - DNA, 125 bp, homo sapiens
cctgacttcaaactacactacaaggctacagtaaccaaaacagagatatagaccaatggatcagaacagagccctcagaaataaccctgacttcaaactatactacaaggctacagtaaccaaaa

SEQ ID NO: 1050 - DNA, 95 bp, homo sapiens
tatgattagaatggttagaatgtataaatataaatatatatctcccccctaacagaaatacatatatatgtatgattagaatggttagaattatt

SEQ ID NO: 1051 - DNA, 95 bp, homo sapiens
atagtactggaagtcccagccagagctggaacaagacaaggatgctgactctcaacacttctattcaaaatagtactggaagtctcagccagagc

SEQ ID NO: 1052 - DNA, 112 bp, homo sapiens
atccatgttggtgtgtagctatattcattttcaatgaatccaatgaaaatgaattcattttcaatcaatccaatggatttcaatgaatccatgttggtgtgtagctatgttc

SEQ ID NO: 1053 - DNA, 77 bp, homo sapiens
atacacagatatcaacatgagaacaacaacaacaacaaaaatagtggaaacatacacagacatcaacatgagaacaa

SEQ ID NO: 1054 - DNA, 102 bp, homo sapiens
atcactatagtcttataagattatagttatacatcatcactatatcatatatcatatcactatatagttatatatcacatcactataatcttataagattat

SEQ ID NO: 1055 - DNA, 78 bp, homo sapiens
taacctttatttaatacaataaataaagggtccaataaaaataaaggccaaataacctttatttaataaaataaataa

SEQ ID NO: 1056 - DNA, 80 bp, homo sapiens
gttgcaatgacccgaaatcgagccactgcactccagcctgggtgggaggcagaagttgcaatgacccgaaatcgagccac

SEQ ID NO: 1057 - DNA, 75 bp, homo sapiens
atttggaggagagctgcccactaaggaaggaacctgggtccctgcattgccatttggaggagagctgcccactaa

SEQ ID NO: 1058 - DNA, 84 bp, homo sapiens
tgtcttgcctttttttagaagtctcatcagtctatgtgatttacagatcttttgtcatgtctgcctttttttagaagtctcatc

SEQ ID NO: 1059 - DNA, 93 bp, homo sapiens
acagaaacacatttgagaatgtagaaacactaaggacagaaacacatttgagaatgtagaaacactaaggacagaaacacatttgagaatgta

SEQ ID NO: 1060 - DNA, 83 bp, homo sapiens
agagccctgcagcttttcatttacctggaggccaaattccctccactgaatcaaagagccctgcagcttttcatttacctgga

SEQ ID NO: 1061 - DNA, 168 bp, homo sapiens
aagggaaacttcctaactcattctacattaccttgatattaaagccagacaacaacatatctaaagaagaactaataccagtctctttgaaaattttcaaaagaattgaaaaagaagggaaacttcccaactcattctacattaccttgatattaaagccagacaaca

SEQ ID NO: 1062 - DNA, 96 bp, homo sapiens
tgacaactacagtcatctgtcacttaacaagtactaggccataaggaataagacatcaatccatgttgacaactacagtcatctatcacttaacaa

SEQ ID NO: 1063 - DNA, 102 bp, homo sapiens
tcctgagcaatgggatctgatgccttttgatggctgctttttaagctaccttatcaacatacgcattgtcctgagcaatgggatctgatgccttttgatggc

SEQ ID NO: 1064 - DNA, 107 bp, homo sapiens
ctctacttaaaatacaaaaattagccgggtgtggtagtgcatgcctatagtcccagcctgaccaacatggcgaaaccccgcctctactaaaaatacaaaaattagcc

SEQ ID NO: 1065 - DNA, 119 bp, homo sapiens
tcaatttctttaggcaacgcctgggtttttatgcattttaaaaattgaaattgaaaaggcattttaaaactgagactaaatagcttggtcaatttctttaggcaatgcctgggttttta

SEQ ID NO: 1066 - DNA, 186 bp, homo sapiens
agctagatacagagtgtcgattggtgcattcagaaatcctgggctagacacagggtgctgattggtgtgcttacaaaccttgagctagatacagagtgccgattggtgtatttacaatccctgagctagacataaaggttctccaaggccccaccagagtagctagatacagagtgtcgactggtg

SEQ ID NO: 1067 - DNA, 131 bp, homo sapiens
tggagtttccagtcatcggtaaattccaaagctctggccccttgctctggagtaccagtcgtcggtaaattggagtcccccaatttaccgggagtcctccctggactggaggtaccagtcgtcggtaaatt

SEQ ID NO: 1068 - DNA, 106 bp, homo sapiens
attcatgtattacttgtataacttttaaaatattctttataaaacattcttggtggtatttttgaatcccaaagaacatattcatgtattacttgtataattttat

SEQ ID NO: 1069 - DNA, 152 bp, homo sapiens
gagtagcagggaccacaggcatgcgctaccatactcaactaatttaaaacatttttttttgtagagatggaatctcacaatgcctgtctcagcctcccgagtagcagggaccacaggcatgcgctaccatactcgactaatttaaaacattt

SEQ ID NO: 1070 - DNA, 88 bp, homo sapiens
aatattttaaaggaatatacaagtatttaatttaatacaagcattaaatctgtaaatatctaaacaacattttaaaggaatatacaag

SEQ ID NO: 1071 - DNA, 102 bp, homo sapiens
agactgggtttcactatgttggccaggtgtgtgtgtgtgtgtgtgtgtgtgtgtgtgtgtgtgtatttttagtagagactgggtttcactatgttggccagg

SEQ ID NO: 1072 - DNA, 95 bp, homo sapiens
aagggcagaaaatacttctttcaaatgaaaacatggttacagaattaaaaatgctgttgcacttaggaaaagggcagaaaatactgctttcaaat

SEQ ID NO: 1073 - DNA, 86 bp, homo sapiens
ctaatttcacctctttccccaactattccctctttgagctttagtttgagctttatagaaccctaattgcacctctttccccaact

SEQ ID NO: 1074 - DNA, 186 bp, homo sapiens
caccaatcagcactctgtatctggctcaaggtttgtaaacacaccaatcagcaccctgtgtttagctcaaggtttatgagtgcaccaatcgacactctgtatctagctgctctggtggggccttggagaacctttatgtctagctcagggattgtaaaaacaccaatcggcactctgtatctagct

SEQ ID NO: 1075 - DNA, 77 bp, homo sapiens
cctattagttctgtccctctaagagtaccctgactaatataataatgatataccctattatttctgtccctctaaga

SEQ ID NO: 1076 - DNA, 77 bp, homo sapiens
gctataacacattcctggccagctctctgagctatgagtgggagcaaaaggagctgtaacacattcctggccagctc

SEQ ID NO: 1077 - DNA, 83 bp, homo sapiens
atctggttggtttgcctgctttactcatttaattaaaaacatacctgaatagttagaacatctggttggtttgcctgctttac

SEQ ID NO: 1078 - DNA, 109 bp, homo sapiens
aataccccaaccccttctctccttgtctctaccccttctctgcttttccagggacagggcaagtaaccgaaccccttgtcttcttgtctctaccccttctctgcttttc

SEQ ID NO: 1079 - DNA, 135 bp, homo sapiens
agtcttaaggccctttcagtggacaaaatgggaatgtatatatatatataatacatatataatatataatatattacccttaagacttaagtcttaaggccctttcagtggacaaaatgggaatatatatatata

SEQ ID NO: 1080 - DNA, 89 bp, homo sapiens
gatagccagctttcatgatgtgaggcagtctcagatggtctcttgaatggctcactctgcagatagccagctttcatgatgtgaggcag

SEQ ID NO: 1081 - DNA, 82 bp, homo sapiens
gagacctggcctcttcaatttctaattgtaaagacaggcgatctaatgatagagtttgagagacctggcctcttcaattcct

SEQ ID NO: 1082 - DNA, 78 bp, homo sapiens
tactccatttatctgttatccaaagagtggacactgttatccaatacaagtggatactccatttatctgttctccaaa

SEQ ID NO: 1083 - DNA, 116 bp, homo sapiens
ctttcaatgtaccatatgcttcaaggtcatgaatttgcaaataaagaagccacagatagtgaggactgactatgttagtgtgatggctttcaatgtaccatatgcttcaaggtcat

SEQ ID NO: 1084 - DNA, 83 bp, homo sapiens
agtgcagtggcacaatctcagctcactgcaatttctgcctcccaggttcaagcaattcagtgcagtggcgcaatctcagctca

SEQ ID NO: 1085 - DNA, 75 bp, homo sapiens
aatcagcaaattaaataaacataaaagttactaactgtacctatagcaatttaatcagcaaattaaataaacata

SEQ ID NO: 1086 - DNA, 117 bp, homo sapiens
agaccacactcatacaaaaccatggcacttatggagaccaggtttctccatgttggtcaggctggtctcgaactcctgacctcagggaagaccacactcatacaaaaacatggcact

SEQ ID NO: 1087 - DNA, 117 bp, homo sapiens; identical to SEQ ID NO: 1086

SEQ ID NO: 1088 - DNA, 87 bp, homo sapiens
taaataaatctacctgaaaccaacagcagaattcaccacagtaagtatttaacagtaagctaaataaatctactgaaaccaacagca

SEQ ID NO: 1089 - DNA, 107 bp, homo sapiens
aatttacatgaaaataaatttcagatgcattaaagacttaggccaactaaaaatattctttcttcacaatttacatgaaaataaatttcagatgcatgaaagactta

SEQ ID NO: 1090 - DNA, 93 bp, homo sapiens
atgtcacatgtaacaacacctatagactcagagtaaagggttggagtcacatgtcacatgtctccatgtcacatgtaacaacacctatagact

SEQ ID NO: 1091 - DNA, 125 bp, homo sapiens
tcagtgagtgcaactattctgatcagcagggtccagggaccattgcaggttcttgggcaagaggtgtttctgctgctgcatcagtgagtgcaactatcctgatcagcagggtccagggaccattg

SEQ ID NO: 1092 - DNA, 123 bp, homo sapiens
ctatcccttgtgtggtcactaggaatagagggaacccaccaatagagaacctacaaaccctcattttgcacattccatactctgctatcccctgtgtggtcactaggaatagagggaacccac

SEQ ID NO: 1093 - DNA, 76 bp, homo sapiens
cacaaaagaagtgaaaatggcctgttcctgccttaactgattacattccaccacaaaagaagtgaaaatggccagt

SEQ ID NO: 1094 - DNA, 120 bp, homo sapiens
ggaattggtgggttcttggtctcactgacttcaagaatgaagccgtggaccctcgcggtgagtgctactgtgtctggaattggtgggttcttggtctcactgacttcaagaacgaagccg

SEQ ID NO: 1095 - DNA, 154 bp, homo sapiens
gttctcatgatagtgagtgagttctcaggagatatgatggttttatggggggagggaccttgtgggaggtgattaaatcattggggaagtcctccaatgccgttctcatgatagtgagtgagttctcaggagatatgatggttttatgggggga

SEQ ID NO: 1096 - DNA, 74 bp, homo sapiens
atttctaataaatatttctaataaatatagataaaatttctataaatatagatttctaataaatatagataaaa

SEQ ID NO: 1097 - DNA, 95 bp, homo sapiens
gcttcatacctgctaggtagaacacaaattatttgttctgttctattcgataatgatgtttgcttcatcctgcttcaaacctgctaggtagaaca

SEQ ID NO: 1098 - DNA, 118 bp, homo sapiens
ttgtatctagttacgtatctatcacatgtatctagttacctatattgtatctagttacctatctattgtattgtattgtacctaatgttgtatctagttacctatctatcacatgtat

SEQ ID NO: 1099 - DNA, 101 bp, homo sapiens
caccccactgacaatattagacagatcattgagacagaaaagtaacaaagacaataatagtgggagtctttaccaccccactgacagtattagacagatca

SEQ ID NO: 1100 - DNA, 113 bp, homo sapiens
acatcctgctgattggtccattttacagagtgctgattggtgcgtttttacagagtgctgactggtgtgtttacaatcctttagctagacacagagtgctgattggtgcattt

SEQ ID NO: 1101 - DNA, 91 bp, homo sapiens
ttttttaaggctgataatagttcattttatatatatctatatctatatatatgtatatatagtctttcttttttaaggctgaataatagtt

SEQ ID NO: 1102 - DNA, 103 bp, homo sapiens
tgtgtctagctcagggtttgtaaatacaccaatcgacactctgtatctagctaatctagtggggacgtggagaacttttgtgtctagctcagggattgtaaat

SEQ ID NO: 1103 - DNA, 94 bp, homo sapiens
tatgtatcttggttattctaaactgtatatataaaaatataaatatatattccaataaaatatatatatttatttatcttggttattctaaact

SEQ ID NO: 1104 - DNA, 152 bp, homo sapiens
aatgctgagtcagggtacccggggtggctgtcgggaaggcgggaataaatggagggaataagcgaaaatgccaagtcagggtggccaagatggccactgggatggtgggaaccggcgaatctgggaatgccaagtcagggtagccaagatgg

SEQ ID NO: 1105 - DNA, 77 bp, homo sapiens
acaagttaatgtggcaccatgagcctgactggcttctataagcatctgttggcacaagttaacgtggcaccatgagc

SEQ ID NO: 1106 - DNA, 109 bp, homo sapiens
gttaatttataattttaatacatgccaataaaaatttcttaaatgggatgactcaacatgataaagattttttttctctctaggttaatttataattttaacacatgcc

SEQ ID NO: 1107 - DNA, 106 bp, homo sapiens
actttgtaacttcacttcagcctctgattggttgctttccacaaccaatcagacacttacaaaggtgtaagttactttgtaacttcacttcagcctctgattggtt

SEQ ID NO: 1108 - DNA, 176 bp, homo sapiens
cccattctcctgcctcagcctccgaagcagctgggactacaggcgcccgccgccacgctcggctaacttttttgtatttttagtagagacagggtttccccatgttaccaggatggtctcgatctcctgaccttgtgatccgcccacctcggcttcccagggtgctgggattacag

SEQ ID NO: 1109 - DNA, 257 bp, homo sapiens
gcgattctcctgcctcagcctcccgagtagctgggattacaagcatgtgtcaccatgcatggctaattttgtatttttagtagagacagggtttctctaggttggtcttgtctcaaactcctgacctcaggtgatccacccacctcggcctcccaaagtgctgggattacagcacttcaccatgttggccaggatggtctcgatctctcgacctcgtgatccgcccacctcggcctcccaaagtgctgggattacag

SEQ ID NO: 1110 - DNA, 102 bp, homo sapiens
gaaacttgaggaagtttctatttcttataaccaaagaatgttgggtatacttgaaacttgaaactttgggtatactagaaacttgaggaagtttctatttct

SEQ ID NO: 1111 - DNA, 108 bp, homo sapiens
gctttcatcctgcttcagtcatgtggtgcccgtgtgatgacttttctaacacccttggctttgaatttgtcaatgccagtgaatgttttcatcctgcttcagtcatgt

SEQ ID NO: 1112 - DNA, 89 bp, homo sapiens; identical to SEQ ID NO: 1080

SEQ ID NO: 1113 - DNA, 91 bp, homo sapiens
acctagctagtaggtcttgggggttcttccctcctaacccctggtatctagaacctggatcgtaaacctagctagtaggtcttggtggttc

SEQ ID NO: 1114 - DNA, 97 bp, homo sapiens
taagtgaatagtgagtgacccattatagtttaatttcttgaggtttcagccctttgggcaactgcgtaagtgaatagtgagtgacccattatagttt

SEQ ID NO: 1115 - DNA, 108 bp, homo sapiens
ggttaaaattattttccgatgtccttgttgagctaggagttaggctgtgtttgctgttgttgtagctgtatgtgttatgggttaaaattattttccaatgtccttgtt

SEQ ID NO: 1116 - DNA, 116 bp, homo sapiens
gatccactggagtgtgtgtgtgtgtgtgtgtgtgtgtgtgtgtgtgtgtgtgtctgtgtgtaggtgggtgagtatgggtgggcatggattgtgtgtgtgtgtgtgtgtgtatgtgt

SEQ ID NO: 1117 - DNA, 86 bp, homo sapiens
agcgacctctgttcttcagccctatctctattcctctgaccccacttcatttctaaatttagcaacctctgttcttcagccctatc

SEQ ID NO: 1118 - DNA, 117 bp, homo sapiens
gcatctcaacacctcgtatcactatttcacaaaccattgaatgtacaatgaatactaagcagaagtaatgaaaagatatccgcatctcaacacctcgtataactatttcacaaacca

SEQ ID NO: 1119 - DNA, 103 bp, homo sapiens
tctggactaagaattagggccagttaccagcgcacagtctgatgaattctcatagagcaaactccccagtgtagttggcatctggactaagaattagggcctg

SEQ ID NO: 1120 - DNA, 88 bp, homo sapiens
ctgcgtgtgctggtctgtaatctgctattggcggaaatgatcaccgttttacaccttcactgcgtgtgctagtctgtaatctgctatt

SEQ ID NO: 1121 - DNA, 81 bp, homo sapiens
cctgtaatgcttagcaaagtgttaaaggttgaacacacaggggaggggcctgacctgtaatgcttagcaaagtgtttaagg

SEQ ID NO: 1122 - DNA, 156 bp, homo sapiens
cccagctaattttttttttttttttttgtatttttagtagagacggggtttcaccgtgctggccaggctggtagctgggatcacaggcatgcaccgccacacccagctaatttttttttttttttttttgtatttttagtagagacggggtttcac

SEQ ID NO: 1123 - DNA, 97 bp, homo sapiens
tattcattcctgggcctgggccaagctaactttgtgagacatttagtttatagtttaagcccgtattcattcctgggcctggaccaagctaactttg

SEQ ID NO: 1124 - DNA, 66 bp, homo sapiens
ttggccctccatatctgtgggttctgcagcatatatattacagttggccctccatatctgtggccc

SEQ ID NO: 1125 - DNA, 124 bp, homo sapiens
tataatatgtatagttgtagtttatcctgagtggttacactatctgttaaataatataataattatataatatgtatagttatataatatgtatagttgtagtttatcctgaatggttacacta

SEQ ID NO: 1126 - DNA, 124 bp, homo sapiens
tagtgtaaccattcaggataaactacaactatacatattatataactatacatattatataattattatattatttaacagatagtgtaaccactcaggataaactacaactatacatattata

SEQ ID NO: 1127 - DNA, 97 bp, homo sapiens
ttgtttcatctgttccttttcttgtttcatccgcccttttcttgtttgattttcctgtttttgtttttgctcttttgtttcatccacccttttcttg

SEQ ID NO: 1128 - DNA, 83 bp, homo sapiens
agtctcagatattcttttataacaactttttaaaactctttgctttttaagttacccagtctcaggtattcttttataacaac

SEQ ID NO: 1129 - DNA, 209 bp, homo sapiens
tatgttgcccaggctggtctcgaactcctgggctgaagtgatcctcggctttgacctcccaaagacgagattacaggcatgaaccaccacacccagccctcaggctggtcttgaactcctggcctcaagccgtcctctatccttggccttccaggcatgagccaccatgcccagccctcaggctggtctcgaactcctggcctcaagcc

SEQ ID NO: 1130 - DNA, 116 bp, homo sapiens; identical to SEQ ID NO: 1116

SEQ ID NO: 1131 - DNA, 162 bp, homo sapiens
acatctggctgattggtccattttacagagcactgattggtcctttttacagagtgctgattggtacgtttttacagagtgctgattggtacgtttttacagagtgctgattggtgcgtttacaatcctttagctaaacacagagtgctgattggtgcgttt

SEQ ID NO: 1132 - DNA, 102 bp, homo sapiens
tgaccacgtgacctgcagctctgatggtgcaacatgagggtatgtcctaccaacaaggtgtgcagcattggacatacttgaccacgtgacctgcggctctga

SEQ ID NO: 1133 - DNA, 81 bp, homo sapiens
aaagaaaggttttacaaagaaaaatgctacaggagcccatcacctagactcatggtaaaaagcaaggttttacaaagaaaa

SEQ ID NO: 1134 - DNA, 99 bp, homo sapiens
tcacctcttgaatgttttgttgcttacaaatttctaaaactgaatgcctttaacagcaccctaatcacctcttgaatgttttgttgcttagaaatttct

SEQ ID NO: 1135 - DNA, 123 bp, homo sapiens
cacaacaaaggcatgatgaggtatgacaaagacatgatgagtaatgatgaagtataatgaggcatggtgaggcatgatgaagcataatgacctatgacaaagacatgatgagtcatgatgaag

SEQ ID NO: 1136 - DNA, 127 bp, homo sapiens
ttctaaatattttaccccatgctattttaaattctaaattctaaatttctaaatattttaccccatgcttctgtaagtacacaagtcacttacagatatatgtattctaaatattttaccccatgct

SEQ ID NO: 1137 - DNA, 123 bp, homo sapiens
aaacagattctacttggttctagctgaagtattatgaactccaaataatgctttgaggacctccaaaggaaaaaaacaaacagattctacttggttctagctgaagtattatcaactccaaat

SEQ ID NO: 1138 - DNA, 593 bp, homo sapiens
aaaaatttaaagaagaattaatactaatcctactcaactattccaaaaaatagaggaagagggaatacttccaaactcattctttgaggccaatattaccctgataaaaaaactagacatagacacatcaaaaaaaggcaactacaggccaatatctcttatggatattggtacaaaaatcctcaacagaattctacattaaaaagatcgttcatcagccaggcatggtggctcatgcctgtaatcccagcacgttgggaggccaaggcaggaggatcacctgaggtcaggagttcaagaccagcctggccaacatggcaaaaccccgtctctactaaaaatacaaaaattaaccaggcatgatggtgggtgcctgtaatcccagctactctggaggctcaagcaggagaatcgtttgaacccaggaggtggaggttgcagtaagccaagattgtgccactgcactccagcctgggcaacaaaagcaaaactctgtctcaaaaaataaaataaaataaaataaaataaataaaataaaataaaataaaataaataaaataaaataaaataataaaataaaataaaatagattc

SEQ ID NO: 1139 - DNA, 106 bp, homo sapiens
agagagttaactgagatacagagacagaggtcagagacagagagatagggagatacagagacatagagacagacagagatagagacagagatcagagacagagaga

SEQ ID NO: 1140 - DNA, 109 bp, homo sapiens
gaccaatcagctctctgtaaaatggaccaatcagcaccctgtcaaaacggaccaatcagctctctgtaaaacagaccaatcagctctctgtaaaatgggccaatcagca

SEQ ID NO: 1141 - DNA, 80 bp, homo sapiens
agacaggcacatgatagaatgtgggaagtacactgaatgtgggaaatacaatgagagagacaggcacatggtagaatgtg

SEQ ID NO: 1142 - DNA, 93 bp, homo sapiens
aaaagcagaaccactaataagggtctaacaaagatcacatgctcctgagggaacagaacaaagggcaaaagcagaaccactgataagggtcta

SEQ ID NO: 1143 - DNA, 94 bp, homo sapiens
cagctttgttcctttgcttagtattgccttagtcctatagtatagtcaggtagtgtgatgcctccagctttgttcctttgcttaggattgcctt

SEQ ID NO: 1144 - DNA, 117 bp, homo sapiens
ctataaattgagttaaggttctaaggtcctagcaatatagaaatagagattatatgtaacaaccagagaggcctataaattgagttaaggttctaagatcctagcaatatagaaata

SEQ ID NO: 1145 - DNA, 89 bp, homo sapiens
cattttacattttctccaaactgttgttcaaagactaaactgtaaatgtaaatgtaaacattttacattttctccaaactgttgttcaa

SEQ ID NO: 1146 - DNA, 106 bp, homo sapiens
caaacgtttatagtagcattattcattatagccaaaatagggaaactcaaacccaaatacttgtacacaaacgtttatagtagcattattcattacagccaaaata

SEQ ID NO: 1147 - DNA, 95 bp, homo sapiens
ctgcttttgttgtatcacacaggttttgtgatacaaaaaatcacataggttttgtgatacaaaagcactgcttttgttgtatcacataggttttg

SEQ ID NO: 1148 - DNA, 112 bp, homo sapiens
taatgagaaataatgaaatcagggaagtgatacatgagcaaaatttctcagctatcttaaatatgctcaatgagttaatgagaaataatgaaatcagggaaatgatacatga

SEQ ID NO: 1149 - DNA, 158 bp, homo sapiens
aactagacaaggaaataagaaacaaagctagacaaggaaataagaaacaaagctagacaaggaaataagaaacacgtatacatatgtaactaacctgcacaatgtgcacatgtaccctaaaacttaaagtataataaaaaaaaaaaaaaaaagaaaca

SEQ ID NO: 1150 - DNA, 140 bp, homo sapiens
ggtggggctaaaaaagaccttgtcttctttatataggagcatcgagattaaagggtgtgaggtaggggtttaaggatggcgcaagtcaggtggggctaaaaaagaccttgtcttctttatataggagcatcgagattaaa

SEQ ID NO: 1151 - DNA, 76 bp, homo sapiens
gtgtgtgtgcttaaggatgtgtggcctcgtgtcagatgacatgtgtgtggggtgtgtgtgtttaaggatgtgtggc

SEQ ID NO: 1152 - DNA, 123 bp, homo sapiens
tgtagatggtagagctccaggtaactgcaaggggggatgatggtgcttcctgagaaggagggaaagattgtgtctgaaacacaatttgctgtagatggtagagctccaggtaactgtaagggg

SEQ ID NO: 1153 - DNA, 153 bp, homo sapiens
cagaagcgcagcaaacaccctgccagatcgacaggggtggaagtcaacagtgggtctgcaatggcgacgatcagcatcgggagcggcagtgggcgcctcactggaccagaagcgcagcgaacaccctgccagatcgacaggggtggaagtcaa

SEQ ID NO: 1154 - DNA, 158 bp, homo sapiens
cggtccggtctgggtccgaggccggtctccccccccctctctgcaggtggcccctgtgcttgctgcccctctctcttctcggtccggtctgggtctctctcttctcggtccggtctgggtccgaggccggtctccccctccctctctgcaggtggccc

SEQ ID NO: 1155 - DNA, 96 bp, homo sapiens
cactcaccagactatggaggattcattgccagactgagaagcaacagcctgggccccagagttggacactgcactcaccagactatggaggattca

SEQ ID NO: 1156 - DNA, 123 bp, homo sapiens
ccccttacagttacctggagctctaccatctacagcaaattgtgtttcagacacaatctttccctccttctcaggaagcaccatcatcccccctttcagttacctggagctctaccatctaca

SEQ ID NO: 1157 - DNA, 112 bp, homo sapiens
ggcactgggtgaggaaggtgagggcagggtccatggataaatttcacagatagagccagcaaggcacaggggggcactgggtgagggaggtgagggcagggtccatggataa

SEQ ID NO: 1158 - DNA, 89 bp, homo sapiens
ccaagacctactagctaggtttacgatccaggttctagataccaggggttaggagggaaggacccccaagacctactagctaggtctac

SEQ ID NO: 1159 - DNA, 102 bp, homo sapiens
tgagcatcctcatgtcagggaagccacacacagaaatgtgcattcacttcccccccacccccacacccagtcattgagcatcttcatgtcagggaagccaca

SEQ ID NO: 1160 - DNA, 152 bp, homo sapiens
agattttggttattttctatccttatgtcttcagttttactaatcttattaggccatttgaatactcactaatagtctgttaattttttaagttttttctcctagattttggttattttctatccttatgtcttcagtttcactaatcttat

SEQ ID NO: 1161 - DNA, 73 bp, homo sapiens
aagtgagtaattgagtattctaatttatacatctacatggtaatcatgaaagtgagtaattgagcattctaat

SEQ ID NO: 1162 - DNA, 141 bp, homo sapiens
taaagtttattttattcccagtgaatacaagtatcaactgaagtaatgttttatcggaattttgataaaggtggtatctgacttgccatgttaaaataaagtttattttattcccactgaatacaagtatcaactgaagta

SEQ ID NO: 1163 - DNA, 79 bp, homo sapiens
tcctgtcactggctgcattcaactgaaaaaaaaaaaaaaatagtgcgaccacagctcctgtcactggctgtattcaact

SEQ ID NO: 1164 - DNA, 98 bp, homo sapiens
tttaaaatccataaattaattttttaaaatactttaaaaactcatttgtcacctttctgggttttgtttgtttaaaatccataaattaattttttaaa

SEQ ID NO: 1165 - DNA, 76 bp, homo sapiens
ctgttctaaagtaggttgagcagcatcctttaccttagccctgaatattggctgttcttaaagtaggttgagcagc

SEQ ID NO: 1166 - DNA, 115 bp, homo sapiens
ttagactcagatttagacattggtgctcataaaactactcataaaaaattcatgttttaatttttcctttcactgttagactcagatttagacattggtgctcataaaaactact

SEQ ID NO: 1167 - DNA, 87 bp, homo sapiens
aaattaaaatttaattttgcttgacaccacctctcccaatagtatttttggaaaacagaaaattaaaatttagttttgcttgacacc

SEQ ID NO: 1168 - DNA, 98 bp, homo sapiens
agagcacacatgcacacaccacatacacataccacatacatctgcacacatgtgcacataaacacccacacacgtacacaccacatacacatacacac

SEQ ID NO: 1169 - DNA, 125 bp, homo sapiens
ataaatgtccatgaaatcttcacaatttatgttcagagactgcagtaacgacaggcataagaaattataaaaatattaatttggggaactaataaatgtccatgaaatcttcacaatttatgttc

SEQ ID NO: 1170 - DNA, 125 bp, homo sapiens; identical to SEQ ID NO: 1169

SEQ ID NO: 1171 - DNA, 118 bp, homo sapiens
tgtgattagaaagaaatttatgactctaacttattatataaaaataaaaacacaacagatcccaatttaggggttactacagttgtgattagaaagaaatttatgattctaacttatt

SEQ ID NO: 1172 - DNA, 76 bp, homo sapiens
accagccattttcacttcttttgtggtggaatgtcatcaattaaggcaggaaccagtcattttcacttcttttgtg

SEQ ID NO: 1173 - DNA, 82 bp, homo sapiens
taaaaatctaacaactctgatatttttatatggtatagacttcaatagtattcaatgtaaatatctaacaactctgatattt

SEQ ID NO: 1174 - DNA, 105 bp, homo sapiens
gtctggtggtgaatcctccatagtctagtgagtgcagtgtctgactctggagcccaggctgttgatttccagtctggtggtgaatcctccatagtctggtgagtg

SEQ ID NO: 1175 - DNA, 111 bp, homo sapiens
taattctccccatccatgatcatgagatatgtttctatttattcatagatttccttgggcaatatggtcatttttacgatactaattctccccatccatgatcatgtgata

SEQ ID NO: 1176 - DNA, 95 bp, homo sapiens
gcttttctggggaaggggcaaatacccctcaaacccttctctccttgtctctaccccttctctgcttttctggggcaggggcaaatacccctcaa

SEQ ID NO: 1177 - DNA, 103 bp, homo sapiens
aaaagccccttataaaaccatcaggtctccttcttcacgtggtggcaggaaggagaagtgttgagcaaaaaatgaaaaagccccttataaaaccatcaagtct

SEQ ID NO: 1178 - DNA, 204 bp, homo sapiens
tgctgattggtccattttacaaagtgctgattggtctattttacagtgtgctgattggtccattttacagggtgctgattggtccattttacaaacctcttgctatctacaaagcactgattggtgtgtttttacagagcactaattggtgcattttacaaacctctagctagctacagagcactgattggtgcgttttacaaa

SEQ ID NO: 1179 - DNA, 107 bp, homo sapiens
aaagagtgatctttccatagaaagtgaatatcaaatacagtgtctggcacaaagtagccactcaatttacactggtgcctggaaagagtgatctgtccatagaaagt

SEQ ID NO: 1180 - DNA, 102 bp, homo sapiens
aatttttagagatttccaaaattacaaaatgtgagcatatgaattattctgtcatcacctcttacatctctcaatttttagagatttcccaaattacaaaat

SEQ ID NO: 1181 - DNA, 92 bp, homo sapiens
agagttaataaacttgcccaaatttatgatattatatttatttaatagggaaatagagacaaagagagattaataaacttgcccaaatttat

SEQ ID NO: 1182 - DNA, 102 bp, homo sapiens
attgagagacaagacaaagatacctgctattacactaacatcataattaatgctacaatatttaaagttttatcattgagagacaaaacaaagatacctgct

SEQ ID NO: 1183 - DNA, 145 bp, homo sapiens
gcttcctgtacagcctacagaaccatgagccaattaaacctcttttctttgccttcttccatgagtgtaagtttcctgaggcctccccagccacgcttcctgtacagcctgcagaaccatgagccaattaaacctcttttctttg

SEQ ID NO: 1184 - DNA, 85 bp, homo sapiens
tttctctatattatctcagtagagaaacaaggcttgatgtgccctgtttggtggaaggtatatttctctatattatctcagttga

SEQ ID NO: 1185 - DNA, 85 bp, homo sapiens
tttttggtgtccaaaacaacaggtactgcttttttaagtatcctggaatctgttcaatttttggtgtccaaaacaacaggcactg

SEQ ID NO: 1186 - DNA, 91 bp, homo sapiens
attgcaaaaggaagtctacaatctgaaagaaaatcttgtcagacaccagacgtgtcttacaaggattgcaaaaggaagtctaaaatctgaa

SEQ ID NO: 1187 - DNA, 78 bp, homo sapiens
ccaattctgcgaagaaagtcattggaagtcaatgcctgcttccttctaacttaccaattctgtgaagaaagtcattgg

SEQ ID NO: 1188 - DNA, 95 bp, homo sapiens
gggaggatcacttgagcccaaaagttcaaggctatactcctagctactctggaggccaagcggggaggatcacttgagcccaaaagttcaaggct

SEQ ID NO: 1189 - DNA, 111 bp, homo sapiens
aagtggttagacatcttgtaaatgaagtaggaatgggagaactttaaaacttatccaaagcactttttaatcatccaagtggttagacatcttgtaaatgaagtaggaatg

SEQ ID NO: 1190 - DNA, 233 bp, homo sapiens
ccacccacatcctgctgattggcccattttacagagagctgattggtccgttttgacaaggtgctgattggtgcgtttacaatccctgagctagacacagagtgctgattggtgtatttacaatcctctagctagacgtaaaagttctccaagtccccaccagattaactagatacagagtgctgattggtgcatccacgaaccccgagctagacgcagagtgctgattggtg

SEQ ID NO: 1191 - DNA, 184 bp, homo sapiens
ggaagggaagggaagcagggagggagggagggagaaggaaggaaggaaggaaggaagggagggagggagggagggagggagggagggagggagggaggaaggaaggaaggaaggaaggaaggaaggaaggaaggaaggaaggaaatataatcaatctatacaagatggatggacggatggacag

SEQ ID NO: 1192 - DNA, 104 bp, homo sapiens
ccctcactacctgggtgcatgcggggccctggccgggtctgtctcagaaccccagctccccacacctgctccctcactacctgggtgcatgtggggccctggcc

SEQ ID NO: 1193 - DNA, 113 bp, homo sapiens
cctaaaaatcagcccacttttgaccttttcttttccttccttccttcctccctccctccctccctcccttcctttcttctcctaaaaatcagcccactttggaccttttcttt

SEQ ID NO: 1194 - DNA, 80 bp, homo sapiens
ctcaaatgatgccaattttcccaaaatgtatctcaaaaaatatatatatataactcaaatgatgccaattttcccaaaat

SEQ ID NO: 1195 - DNA, 76 bp, homo sapiens
cacacccaactctctagccttatccccttccttgtttcctcctgatttgaaccacactcaactctctagccttatc

SEQ ID NO: 1196 - DNA, 113 bp, homo sapiens
atcacattggctgacttccaagtttattctaaagctattaaaataagctctaaagctactaaagaaagctggaggcatcacattggctgacttctaagtttattctaaagcta

SEQ ID NO: 1197 - DNA, 126 bp, homo sapiens
tgataaatatccatgaaatcttcacaatttatgtttggagactgcagtaaagacaggtgtaaaaaattataaaagtattaattttgggaactgataaatgtccatgaaatcttcacaatttatgtt

SEQ ID NO: 1198 - DNA, 146 bp, homo sapiens
agtattggaagtacagagaaggactcataaaaattgggctggagttatttaaccttgaatactgtgggtgatttttttttccttttgtaggaagggagtattggaagtacagagaaggagtcataaaaattgggctggagttattt

SEQ ID NO: 1199 - DNA, 78 bp, homo sapiens
atagtatatagtatggataaatatatatgtgtctgtatgatagtatatagtatatagtatatagtatggataaatata

SEQ ID NO: 1200 - DNA, 100 bp, homo sapiens
ccaatcagtgctctgtaaaaatgcaccaatcagtgctctgtggctagctagaggtttgtaaaatgtgccaatcagtactctgtaaaaatgcaccaatcag

SEQ ID NO: 1201 - DNA, 110 bp, homo sapiens
ccaacaaccacagaatatgcattcttctcatttaaattctacacttgactaattggacctacatcgacagaatactctggccaacaaccacagaatatacattcttctca

SEQ ID NO: 1202 - DNA, 89 bp, homo sapiens
ggggacaaaattgacagctaaaaaatggtatcaatctgcaaaacttttttttttcagttgatggtggggacaaagttgacagctaaaaa

SEQ ID NO: 1203 - DNA, 87 bp, homo sapiens
cttgctataatcacttattcatttcaactaaatgaaaatgaaaattgcaatgctgaattgcaagctggctataatcacttattcatt

SEQ ID NO: 1204 - DNA, 133 bp, homo sapiens
tcttacagaatattcttataaatattcttatcttatagaattagtatcgtttgttgtatagtaagcataagtatatagtttgttggggctattcttatagaatattcttataaatattcttatcttatagaat

SEQ ID NO: 1205 - DNA, 90 bp, homo sapiens
tgacctttgtcactgggatggtggcaggtagaagccgtgaccctcccagaaacaccctggtgacctttgtcactgggatggtggcaggta

SEQ ID NO: 1206 - DNA, 112 bp, homo sapiens
tgcctgcctctgagggtggttgggagatggagtgtgacattgtgtcctgagtccggaggctctcccagcagtgagaagggatgcatgcctgcctccgagggtggttgggaga

SEQ ID NO: 1207 - DNA, 90 bp, homo sapiens
tttacaatcctttagctagacacagagcgctgattggtgcgtttttacagagtgctgattggtgcatttacaatcctttagctagacaga

SEQ ID NO: 1208 - DNA, 97 bp, homo sapiens
gaggcactgaggcagagacaagccctggatgccttccgattcctccgttcagccagcacgagtgaagaagagcggagacactgaggcagagacaagc

SEQ ID NO: 1209 - DNA, 105 bp, homo sapiens
ttttaatctttctatatgtagttactcataagttagcatctcactgcgcccggccccatctcaccattttgatctttctatatgtagttactcataagttagcat

SEQ ID NO: 1210 - DNA, 89 bp, homo sapiens
atggtatcacgcgggtggaggaagcacagccccaccgtcctggaggctgggtgaggaagcgaatatggtatcacccgggtggaggaagc

SEQ ID NO: 1211 - DNA, 90 bp, homo sapiens
tttgttacacaggtatacatgtgccttgttggtaagttccagggtacatgtgcacaacgtgcagatttgttacataggtatacatgtgcc

SEQ ID NO: 1212 - DNA, 76 bp, homo sapiens
ggcaactggaatccgaacagggtgccccttgtccaaccttgcagtaagtcgtggcaactggaatcagaacagggtg

SEQ ID NO: 1213 - DNA, 131 bp, homo sapiens
tttctgcaacttttctgtgacatctgaaattttttaaatttaaaaaatttaatcgtagaatcttagcagtccatatataggtgatcactgtgaaatttctgcaacttttctgtgacatctgaaatttttta

SEQ ID NO: 1214 - DNA, 105 bp, homo sapiens
atctgggtaactaaagctttgggaagtaatttaaagtggaagcatgtgatggctccaccgagtttgtgtgtgtaggaatctgggtaactaaagctttgggaagta

SEQ ID NO: 1215 - DNA, 93 bp, homo sapiens
gcacgcgcgtaacggcttggctgccctgtaacggcttgcacgtgcatgctgcacgcgcgttaacggcttggctggcatgtagcggcttggctt

SEQ ID NO: 1216 - DNA, 109 bp, homo sapiens
tagccaggcatggtggcacatgcctgtaatctcagctactcaagaggctgaggcagaagaatcgcttgaacctgggaggtgggtagccgggcatggtggcacatgcctg

SEQ ID NO: 1217 - DNA, 94 bp, homo sapiens
tctgacaactaaagccagattgtctgctttagtcaatctgttagatcaattagtcatttgatctgacaactaaagccagattgtctgctttagt

SEQ ID NO: 1218 - DNA, 98 bp, homo sapiens
caccgtttgccatagccaagagaacccttgggcactgttggcaggaatgtaaaatggtacagccactgtggaaaacaccgtttgccatagccaagaga

SEQ ID NO: 1219 - DNA, 92 bp, homo sapiens
ctaatcacatgctgtgattatgcaactggctcttgatgaaatgggcatcgctttcttctgttttctaatcacatgctgtgattatgtaactg

SEQ ID NO: 1220 - DNA, 122 bp, homo sapiens
tttctttgacaatatccacatatgacagatttaccaaaaataaaatctgtttttgccatttagtcatggtctagctctggctttctttgacaatatccacatatgacagatttaccaaaaat

SEQ ID NO: 1221 - DNA, 133 bp, homo sapiens
gaacataaattgtgaagatttcatggacatttatcagttcccaaaattaatacttttataatgtcttatgcctgtctttactgcaatctctgaacataaattgtgaagatttcatggacatttatcacttccc

SEQ ID NO: 1222 - DNA, 92 bp, homo sapiens
aaatatcatcttagtattcttataaaattctaagtattcttataaaaattcttttaaaatattcttaaaaaataacatcttagtattcttat

SEQ ID NO: 1223 - DNA, 92 bp, homo sapiens
gtaagacagcatgcaggtgtggttcctctgcctcatcctgggtacccaccaccagcttagggcacgtaagacagcatgcaggtgtggttcct

SEQ ID NO: 1224 - DNA, 91 bp, homo sapiens
ataggaacaatggggatgcaaatcaattcctaaactgtcttaggaccccaatatcagaaatcctactcataggaacaatggggatgcaaat

SEQ ID NO: 1225 - DNA, 102 bp, homo sapiens
attggtgcatttacaaacctttagctagacacagagcactgactgttgcgtttctacagagtgctaattggtgcatttacaaacctttagctagacacagag

SEQ ID NO: 1226 - DNA, 110 bp, homo sapiens
tttttttcttttgtagaaatggggttccactagctgggactacaggtgcatgctaccatacccggctaattgttctggtttttttcttttgtagaaatggggttccacta

SEQ ID NO: 1227 - DNA, 125 bp, homo sapiens
gaacataaattgtgaagatttcatggacatttattagttccccaaattaatacttttataatttcttatacctgtctttactgcaatctctgaacataaattgtgaagatttcatggacacttat

SEQ ID NO: 1228 - DNA, 93 bp, homo sapiens
aaatacatttatatatgtattttatacacatatatatttggatatatatacaatacatatacatacaatagaatacaaatacatttgtatatg

SEQ ID NO: 1229 - DNA, 63 bp, homo sapiens
ggggtctttaagaggtaattaggccaggtgtggggggggggcgggccttaagctataattagg

SEQ ID NO: 1230 - DNA, 93 bp, homo sapiens
aaaattgtgtagaatattataatcagccatgtcttatattgtaaatttgatcttgatgaattataaaattgtgtagactattataatcagcca

SEQ ID NO: 1231 - DNA, 90 bp, homo sapiens
taaaaggtttaacacagtggtatgtgtgcgagactccctctcaaaaaaaggagggagaaactaaagggtttaacacagtggtatgtgtgc

SEQ ID NO: 1232 - DNA, 75 bp, homo sapiens
aaatactgaaggactgtttcaagtagtccttcaaagtccttcaaagaaaggaaatactgaaggactgtttcaaag

SEQ ID NO: 1233 - DNA, 81 bp, homo sapiens
gttcaagtctgctccatccacagggtcctccccatgacctatgccctccagagcttggttcaaatctgctccatccacagg

SEQ ID NO: 1234 - DNA, 118 bp, homo sapiens
tgtgctatatctatctatgagaaaggtttaccatgaattacagagacactttcttgtatgccatgaaatgcctgcaaatgtgtgtatgtgtgctatatctgtctatgagaaaggttta

SEQ ID NO: 1235 - DNA, 99 bp, homo sapiens
accaatcagcactctgtgtctagctaaaggtttgtaaatgcaccaatcagcactctgtaaaaacgcaccaatcagcactctgtgtctagctaaaggttt

SEQ ID NO: 1236 - DNA, 84 bp, homo sapiens
agaaatttgaggaatcaaatggatcccaaatcaccctaaaaattctaaatgttatcaatagaaatgtgaggaatcaaatggatc

SEQ ID NO: 1237 - DNA, 92 bp, homo sapiens
tggtggtgagaaaactaaaataagggaaatatactttttttacccacaccatgttctctgccttcagactggtggtgagaaaacaaaaataa

SEQ ID NO: 1238 - DNA, 90 bp, homo sapiens
aaaatctgaaactttttgagctctgacatgatgtcacaagtggaaaattgcacatctgacctcaaaaatctgaaacttcttgagctctga

SEQ ID NO: 1239 - DNA, 109 bp, homo sapiens
agctagatacagagtgtcgattggtgtcttcacaaaccctgagctagacacaaggtgctgattggtgtatttacaaaccttgagctagatacagagtgccgattggtgt

SEQ ID NO: 1240 - DNA, 90 bp, homo sapiens; identical to SEQ ID NO: 1238

SEQ ID NO: 1241 - DNA, 109 bp, homo sapiens; identical to SEQ ID NO: 1239

SEQ ID NO: 1242 - DNA, 82 bp, homo sapiens
agctgcatctggtggcaggctttatagtggcaagtgaatccatgtacttcaattgcacagctgcatctggtggcagacttta

SEQ ID NO: 1243 - DNA, 78 bp, homo sapiens
acactgttggtgggattgtaaattagttctcgattgcagaaaaaaaggaaacacacactgctggtgggattgtaaatt

SEQ ID NO: 1244 - DNA, 73 bp, homo sapiens
ttgatgtgaagtattcatattaaatattcaaattgttatgtgcttatgaattgatattaaggtttcatattaa

SEQ ID NO: 1245 - DNA, 125 bp, homo sapiens
tattggaaagtattagctctatctaaaagatggaagcattacctgaaaaaaagctgagtttaaaaacaaattcaataaatattagaaagtattagctctatctaaaagatggaagcattacctga

SEQ ID NO: 1246 - DNA, 109 bp, homo sapiens
aacaatctctgttctatttgaataacaatgaccctgtttccatttttttttccattttctatagggacagtagtttccatatataacaatctctgttctacttgaataa

SEQ ID NO: 1247 - DNA, 113 bp, homo sapiens
cactaagaggcaaaatggcagagtttaactggtatatgaccttcctctaggaacaccagactggtaagggaaaaatgcctcaagtcactaagaggcaaaatggcagagtttaa

SEQ ID NO: 1248 - DNA, 127 bp, homo sapiens
gaacataaattgtgaagatttcatggacatttattagttccccaaattaatacttttataatttcttatgcctgtctttactgcagtctctgaacataaattgtgaagatttcatggacacttatta

SEQ ID NO: 1249 - DNA, 114 bp, homo sapiens
aaattctgactagtcttttgaaattatatttaaagtcatattcatagcatactagagcagaagtgtggactgtgttcatttgaaattctgactagtcttttgaaattatattta

SEQ ID NO: 1250 - DNA, 155 bp, homo sapiens
tcgtggtctcgctggctcaggagtgaagctgcagaccttcgcggtgagtgttagggctcttaaggcagcgcgtctggagttgttcgttcctcctggtgggctcgtggtctcgctggcttcaggagtgaagctgcagaccttcgcggtgagtgtta

SEQ ID NO: 1251 - DNA, 138 bp, homo sapiens
aaacagacatacagtacatacactaaaatgcatgaagggattagacaaaaaatgcatgacggtattagacaaaaaaaaattagacagtataaaaacagacacacagtacatacactaaaatgcatgaagggattagac

SEQ ID NO: 1252 - DNA, 72 bp, homo sapiens
tatatataaacaataaatttaattgaattttttagtatatatatttctatatatatatactaaatatatata

SEQ ID NO: 1253 - DNA, 102 bp, homo sapiens
atcacaagaacagcaaggggaaaatctgcaaccagatctttctaacaaccagacttgtgagagctcactcatgatcacaagaacagcaaggaggaaaatctg

SEQ ID NO: 1254 - DNA, 109 bp, homo sapiens
gtccagggactgttgcgggttcttgggcaagaggtgtttctactgctgtgtcagtgagcacaactattccaatcagcaaggtccagggactgttgagggttcttgggca

SEQ ID NO: 1255 - DNA, 103 bp, homo sapiens
tgtggtatatatatactatggatatggataaagaaactgtggtatatatatactatggatatatggatatatatatatatgtggtatatatatactatggata

SEQ ID NO: 1256 - DNA, 110 bp, homo sapiens
tattatgggtaagaaattaagaaaaattgttgacatttatgagtaacgtttattgataatgtttatgggttatattatgggtaagaaattaagaaaaattattgacattt

SEQ ID NO: 1257 - DNA, 113 bp, homo sapiens
ctataagaagtgattttgtgtatcttggtggagaggtgtatctaggtttcaaaaagatttttcagaatgtcaaagtacctataagaagtgattttgtgtatcttggtgaagag

SEQ ID NO: 1258 - DNA, 125 bp, homo sapiens
tttgattagttcagtcaacttattagggacttcagttatatctggaaagggcttgcctggttagatcaggcccacacaacacagtgtttgattagttcagtcaacttattagggacttcacttat

SEQ ID NO: 1259 - DNA, 91 bp, homo sapiens
gtcaggatttaacactggagtaatccagaggcgcgggagaatgggttttgaatatcggaaagtgaaacgtcaggatttaacactggagtaa

SEQ ID NO: 1260 - DNA, 103 bp, homo sapiens
aagtgatatctgcactcccacatttattatttatgcccactggatatatccgaaagaaaagaaatccgtatatcgaagtgatatctgcactctcacatttatt

SEQ ID NO: 1261 - DNA, 92 bp, homo sapiens
gaaataacactgagcttcttggtgagtgtggatagcctgggaaaaggattactttttttaaaatcaggaaataacactgaccttcttggtga

SEQ ID NO: 1262 - DNA, 99 bp, homo sapiens
tagctgctgcagagcaattcctccttctccctaaaggacataggagatagttaaaagttgtcatacgctagctgctgcagagcaattccttcttctccc

SEQ ID NO: 1263 - DNA, 77 bp, homo sapiens
aagacaggaaatgtgggaaagtttggaacttccaagagacttggaaagctcataagacaggaagatgtgggaaagtt

SEQ ID NO: 1264 - DNA, 103 bp, homo sapiens
atcttcaatatctgaatatccatgtattgatgtatgtatatatctatttatctatctttcttttctccaatcttcaatatctgaatatccatgtatcgatgta

SEQ ID NO: 1265 - DNA, 81 bp, homo sapiens
agcaataaactttttaaaaatatcatttataggtcaggcgaggtggcatatctttatcagcaataaattttttaaaaatat

SEQ ID NO: 1266 - DNA, 79 bp, homo sapiens
tcagttctctcccaattctgtttctaaatagactttgttactgattatagtagtcagttctttcccaattctgtttcta

SEQ ID NO: 1267 - DNA, 78 bp, homo sapiens
actgccccaaccagtagttgtaaacgttctgtagaccactaaagagcacggataaactgccccaaccagtagctgtaa

SEQ ID NO: 1268 - DNA, 147 bp, homo sapiens
attggctttaggttccctgccctagacccaggtgttttccctttgattgaactttaggaaattggccttagattccctgcccccagatcttggtgtttctcttttaggaggttagcacagattggccttagattccctgcctccaga

SEQ ID NO: 1269 - DNA, 76 bp, homo sapiens
ccagtctcaggtagttctttataaattacccagttcttttctttataaactacccagtctcaggtagttctttata

SEQ ID NO: 1270 - DNA, 84 bp, homo sapiens
aagtgtattgtatttacttactattgcatatcaatatagattcaatgcaatagttaagtgtattgtatttacttaactattgca

SEQ ID NO: 1271 - DNA, 75 bp, homo sapiens
aatgtcatcagctaaggcaggaacaagacattttcacttcttttgtggtggaatgtcatcagttaaggcaggaac

SEQ ID NO: 1272 - DNA, 91 bp, homo sapiens
gatgggatctgatgccttttgatagctgcttttttagctaccttatcaacataagtgttgccctgagtgataggatctgatgccttttgat

SEQ ID NO: 1273 - DNA, 92 bp, homo sapiens
aaacaaaaacaaacctgacactgtgacactggactctgcttgtggcccccgatttgacttatgctaaaacaacaaaaacaaaaacaaacctg

SEQ ID NO: 1274 - DNA, 107 bp, homo sapiens
tccagtttccttattccttattatggaataaggaatataatccaaggaataaggaatataataaggagaataatccttattctccagtttccttattccttattatg

SEQ ID NO: 1275 - DNA, 82 bp, homo sapiens
gtctctaggaagttccaatctttcccaccaatttctgtcttctaagccctccaagtctctaggaagttccaaactttcccac

SEQ ID NO: 1276 - DNA, 98 bp, homo sapiens
aggaatgtactgcctccaaaatccaaattcaggtcactctataaatgggccagagtaacacacccaaatgaggaatgtattgcctccaaaatccaaat

SEQ ID NO: 1277 - DNA, 97 bp, homo sapiens
atcttttacccatttttcgattatatttttcaatcaataaattgaaaaatgtcaaaagactgaagcatcaaatcttttacccatttttccattatat

SEQ ID NO: 1278 - DNA, 98 bp, homo sapiens
aagctgttttaataatatcaacaaaacagtatcattaaacagcagtttttataatatcaacagcttactattaagctgttttaataatatcaacaaaa

SEQ ID NO: 1279 - DNA, 106 bp, homo sapiens
agcatgtgttattaaaaagagttgcctattgaaatgatcatgtttctggagaaattaagcttatagacagcatgtgttattaaaaagagttacctattgaaatgat

SEQ ID NO: 1280 - DNA, 112 bp, homo sapiens
gcaagcatatacttacactatataggagtatataattataccatatagattatatatagtatatatatatatatacatacacacacaaggagtatataattatactatatag

SEQ ID NO: 1281 - DNA, 98 bp, homo sapiens
aaataaataaatattccttctaatatttatttatatatgttatatatatttcttctaatatttacatatatatctaaataaataaatattccttctag

SEQ ID NO: 1282 - DNA, 83 bp, homo sapiens
agtctatagttgattcagattctttatgttttttaacctaatttttattattaagtatagtctacagttgattcagattcttt

SEQ ID NO: 1283 - DNA, 141 bp, homo sapiens
atatactaataagagcaacaaatcttcatgagcttatatatgtatacatacgtatgtgtacgtacatatgtatacatatatatgtgtatgtatatactaataagagcaacaaatcttcatgagcttatatatgtatacata

SEQ ID NO: 1284 - DNA, 88 bp, homo sapiens
gtttaatttttaccactgaattaccattagcttttatttacatttgaaagtaatagaatatttttgtttaatttttaccattgaatta

SEQ ID NO: 1285 - DNA, 110 bp, homo sapiens
tttggttggtagactattagttactggctcctctttgtacctctggtagaatttggctgtgaatccatctggtcctgggcttcatttggttggtagactactagttactg

SEQ ID NO: 1286 - DNA, 107 bp, homo sapiens
ataaaatatagctgttaactgggtgtggtggcaagagtgaaactctgtctcataaatacatacatacatacatacataaaatatagctgttaactgggtgtggtggc

SEQ ID NO: 1287 - DNA, 95 bp, homo sapiens
cactctgttacccaggctggagtgtgtgcatgcacaggagagagaaagagagagagacagagacaggatctcactctgttacacaggctggagtg

SEQ ID NO: 1288 - DNA, 85 bp, homo sapiens
aaaatatttggaaattatttatatccagaaatataaaattttatattttatataaattttaaaataatttggaaattatttatat

SEQ ID NO: 1289 - DNA, 106 bp, homo sapiens
taaatatatgttcaatatagggtttgaatatgagtattaggtgtaatactcacattaagaatatgagtattaggtatagtatatatatatgttcaatatagggttt

SEQ ID NO: 1290 - DNA, 106 bp, homo sapiens; identical to SEQ ID NO: 1289

SEQ ID NO: 1291 - DNA, 157 bp, homo sapiens
cattaaatgtattcaataaattatatggtactgatatattctagagattctatattctgccaatcatgcctataaaaaccaaagctcctaaaatcattcttttatggcattaaatgtattcaataaattatacggtactgatatattctagagattc

SEQ ID NO: 1292 - DNA, 164 bp, homo sapiens
atgagtccttcattcctctttgtggcttaataatgtgtatatacacaggcatacttcattcctctttgtggcttaataatgtgtgtatatatatatatatatatatatatatatatatatatatataggcatacttcattcctctttgtggtttaataatgtgt

SEQ ID NO: 1293 - DNA, 93 bp, homo sapiens
gatgagaaaaatctaaaaacattttgtaactctctgactacttaattgttacaagaataaaaaatgatgagaaaatctaaaaacattttgtaa

SEQ ID NO: 1294 - DNA, 81 bp, homo sapiens
atctcctaggggtcctagccaggatgttaaattctgcatcttggaatgaatttacaacatctcctaggagtcctagccagg

SEQ ID NO: 1295 - DNA, 101 bp, homo sapiens
tgtctcttttaggtagcatagagttaggtcatattttataaaaattcaatctatttgtgcctttagatttaaattgtgtctcatttaggtagcatagagtt

SEQ ID NO: 1296 - DNA, 147 bp, homo sapiens
cagctgtaggaaggagctacccattttgggactcctcgcctgttcaggataaactgcctgtggaaaggagctacccactgtgggtctctctgctgagagctggacactcatctggacaacttgcctgtggaaaggagctacccactg

SEQ ID NO: 1297 - DNA, 115 bp, homo sapiens
caactattccgatcagcagggtccagggactgttgcgggttcttgggcaggggttgtttctgctgctgcattggtgagagcaactattccaatcagcagggtccagggactgttg

SEQ ID NO: 1298 - DNA, 152 bp, homo sapiens
cttttctggggaaggggcaagtaccccaaacccttctctccttgtctctaccccttctctgcttttctggggaaggggcaagtacccctcaactccttctccttcacccttagtggcaagtcccgcttttctgggggagcggcaagtacccc

SEQ ID NO: 1299 - DNA, 83 bp, homo sapiens
cacagcaaaaggtacggatgcaagagagggaaagaactgaggccatcactgctatcacagcaaaaggtatggatgcaagagag

SEQ ID NO: 1300 - DNA, 72 bp, homo sapiens
aaaaacaaacattaatcataattgtatgtaaaacttaaacaattttgggaaaaacaaacattaatcatgatt

SEQ ID NO: 1301 - DNA, 102 bp, homo sapiens
cccctaggaaagcgggacttgccactaagggtgaaggagaaggggttgaggggtacttgcccctgccccaggaaagcgggacttgccactaagggtgaagga

SEQ ID NO: 1302 - DNA, 122 bp, homo sapiens
tgtttcccaggctggtctctaaattttgtgccatgcaccaccatactcagatgatttttgtatttttttgtagagatggggttttgccatgtttcccaggctagtctctaaattttgtgcca

SEQ ID NO: 1303 - DNA, 104 bp, homo sapiens
tacatagtttttgcctgagattcagatctcaggcaaaaaattcattcaatctacatacaatacatagaaatacagtacatagtttttgcctgagattcagatct

SEQ ID NO: 1304 - DNA, 105 bp, homo sapiens
actggtcctaatgaagtgaaaggaccaggtcctaaggaagtgaaagaacacttccaggtcctaagtgttctaggcttccaggtcctaaggaagtgaaagaacact

SEQ ID NO: 1305 - DNA, 93 bp, homo sapiens
tcaaatttatattccagaaggaagtgttttgcctaaacatttgctttatctcagaatccaagactcctgatcaaatttatattccagaaggaa

SEQ ID NO: 1306 - DNA, 75 bp, homo sapiens
ttttctttataaattacctggtcttgagttttattttcttcataatttttaattttctttataaattacctggcc

SEQ ID NO: 1307 - DNA, 79 bp, homo sapiens
tatgacatcaactatgggattgttttatatgcattgggatggttgtaatattgagtatgacatcaactatgggattgtt

SEQ ID NO: 1308 - DNA, 107 bp, homo sapiens
gtccctggaccctgctgatcggaatagttgtgctcaccaatgcagcagcagaaacacctctcacccaagaacctgcaacggtccctggaccctgctgatcagaatag

SEQ ID NO: 1309 - DNA, 125 bp, homo sapiens
ctagatattaatgaaaatgtatttacccaagtagaagtgtctagggatactagatctagtagtatctaaagtagtagtagtatctatggatactagatattaatgcaaatgtatttacccaagta

SEQ ID NO: 1310 - DNA, 125 bp, homo sapiens
ataaatgtccatgaaatcttcacaatttatgttcagagattgcagtaaagacaggcgtaagaaattataaaagtattaatttggggaactaataaatgtccatgaaatcttcacaatttatgttc

SEQ ID NO: 1311 - DNA, 91 bp, homo sapiens
cctggttagctccttccatccaaatcttttcctcctttatctaattgtgccattcattgtttgaaagcctggttagctccttccatcaaaa

SEQ ID NO: 1312 - DNA, 87 bp, homo sapiens
taataagtcaaattaacttttaaaaatacacttaaaataataaatatttgtattatattatttagaatgtcaaataacattataata

SEQ ID NO: 1313 - DNA, 89 bp, homo sapiens
ctttttgtagctacaactctgaaaatccctagtggccagaaactaaccttgctgatgaacccgctttttgtagctacaactcagaaaat

SEQ ID NO: 1314 - DNA, 82 bp, homo sapiens
tgtttaattccatttatattctggatagtgtatccagaataggtaaatcacatactgtttaattccatttgtattctggata

SEQ ID NO: 1315 - DNA, 81 bp, homo sapiens
taaatataataaagttttaatctgaacaagaacaaaataacaattcctttggttaaatataataaaggtttaatctgaaca

SEQ ID NO: 1316 - DNA, 106 bp, homo sapiens
ccccaccagattagctagatacagagtgccgattggtgtatttacaatccctgagctagacataaaggttctccaaggccccaccagagtagctagatacagagtg

SEQ ID NO: 1317 - DNA, 81 bp, homo sapiens
tcttttttggattgtttgctgttggcatacagaaattgtttgctgttggcaatagaaatcttttttggattgtttgctgtt

SEQ ID NO: 1318 - DNA, 76 bp, homo sapiens
cacaaaagaagtgaaaatggcctgttcctgccttaactgatgacattccaccacaaaagaagtgaaaatggccggt

SEQ ID NO: 1319 - DNA, 96 bp, homo sapiens
tcttcactacgtagtttacttattgtaagcatgtacttattgtaagcatgtacttattttgtctcttcgctacgtagtttacttattgtaagcatg

SEQ ID NO: 1320 - DNA, 322 bp, homo sapiens
gaccaacctggccaacatggcgaaaccccatctctactaaaaatacaaaaatgtagatgggcatggtggtgcgtgcctgtaatcccagctactcgggaggttgactcaggagaatcgcttgaacccgggaggcggaggttgcagtgagctggtatggtgccactgcactccagcctgggcaacagagcgagactgtgtctcaaaaaaaaaaaaaaaaaaaaaaaaaaaaaagcttttatgggaatacagcttttaaaacgtgtacttgattttctccagcctgggcaacagagtgagactgtgtctcaaaaaaaaaaaaaaa

SEQ ID NO: 1321 - DNA, 80 bp, homo sapiens
tgtgtgtgtgtgtgtgtgataaagcagatcacacacaggtgatctctgtgtgtgcccagtgtgtgtgtgtgataaagcag

SEQ ID NO: 1322 - DNA, 71 bp, homo sapiens
cataaatagcattggaattatctttttctttcttcatgacctggaaaacataaatagcattggaattatct

SEQ ID NO: 1323 - DNA, 127 bp, homo sapiens
aaaatataagaattctattgcatgagttgaacataccatgtttaagaccataccatgtttaacctagacaagaatagattttgaaaatataagaattctattgcatgagttgaacctaccatgttta

SEQ ID NO: 1324 - DNA, 84 bp, homo sapiens
ctgttgcccaggctgtagtgcagtggtgtcatcacatctcagtgcagccccaaactcctgttgcccaggctgtagtgcactggt

SEQ ID NO: 1325 - DNA, 106 bp, homo sapiens
tcttcgttacgatgctacataacaactactcctgcaaactactcatcactgagtagtttttatgtagcatctttgttacgatgctacataacaactactcctgcaa

SEQ ID NO: 1326 - DNA, 78 bp, homo sapiens
gaaagtttgaaacttcctagagacttggagggctcagaagacaggaagatgtgggaaagtttggaacttcctagagac

SEQ ID NO: 1327 - DNA, 81 bp, homo sapiens
ggtactagtgcacaaaaccagataccaactaaaaattctagtagaggaataaaagggtaccagtgcacaaaaccagatacc

SEQ ID NO: 1328 - DNA, 118 bp, homo sapiens
aattatatctgaataaagctgtttaaaataaaataggcttgtaaaggtctcaaaaaagagtgttctagaagcctgctatgttaattatatttgaataaagctgtttaaaataaaatag

SEQ ID NO: 1329 - DNA, 81 bp, homo sapiens
ttgcagcagaaatctgttttagtgcatgaccaaagattaatccgcataggaaagtgtttgcagcagaaatctgttttagtg

SEQ ID NO: 1330 - DNA, 112 bp, homo sapiens
ggcagaggttgcagtgagctgagatcatgccactgtaatcccagctacttgggaggctgaggcaggagaattgcttgaacctggggggcggaggttgcagtgagctgagatc

SEQ ID NO: 1331 - DNA, 84 bp, homo sapiens
cacaggcaaaaggtttttgttgttactatacaggcaaattattattatacaggtgatatcacaggcaaaatgtttttgttgtta

SEQ ID NO: 1332 - DNA, 108 bp, homo sapiens
tcccagaggcttgtctccccttctctttgcggggaggtgaggagcaggactggggggatatggaaggagcaggctggggctcccaaaggcttgtctccccttctcttt

SEQ ID NO: 1333 - DNA, 108 bp, homo sapiens
gagaccatcctggccaacacggtgaaaccccatctctactggcgggtggatcatgaggtcaagagatcgagaccatcctggccaacacagtgaaaccccatctctact

SEQ ID NO: 1334 - DNA, 83 bp, homo sapiens
aatgtcataaattcttacagagcagtttttgccatattttttcatgtctattttttaatgtcataaattcttacagatgcagt

SEQ ID NO: 1335 - DNA, 105 bp, homo sapiens
ggagtctgagaaatccaagaataacccagctgcctatgttttatctcgtctacacacaggagaactgggagtctgagaaatccaagaataacccagctgcctatg

SEQ ID NO: 1336 - DNA, 87 bp, homo sapiens
cacctgcaaaactcccaaatccctatccctattgctactatttcctcctctgggctccaaccacctgcaaaactcccaaatacctat

SEQ ID NO: 1337 - DNA, 90 bp, homo sapiens
attccctagaaatacaaataaaagcaataaaagcagatctggtaataattccctagaaataataattccctagaaatacaaataaaagca

SEQ ID NO: 1338 - DNA, 104 bp, homo sapiens
tattacatatactataatatatactatctatatatactcatttgtatatataagcaaatatatacatcctaaatactatcatattatatatactataatatata

SEQ ID NO: 1339 - DNA, 77 bp, homo sapiens
gcctcccaggaagttgagatttcaggaagttcaagcgattcttgtgcctcagcctcccgggaagttgagatttcagg

SEQ ID NO: 1340 - DNA, 106 bp, homo sapiens
gctggtctcaaactcctggcttcaagctaagtttttaaatttattttttgtagagatggagtctcattttgttgcccaggctggtctcaaactcctagcttcaagc

SEQ ID NO: 1341 - DNA, 75 bp, homo sapiens
aatgccatcagttaaggcaggaacaggctattttcatttcttttgtggtggaatgtcatcagttaaggcaggaac

SEQ ID NO: 1342 - DNA, 131 bp, homo sapiens
caatgttatttctgtgaaccaatgagaatttctgacaacttttttgccataacccataccttatagcttaacaacgtagagccaatcactaatcaatgttatttctgtgaaccaatgagaattcctgacaa

SEQ ID NO: 1343 - DNA, 132 bp, homo sapiens
tgttcattagaagcccaaacccccagcatcatgccatacatatatatataaaattattatatataatatataaatatatattttatatatatatttgttcattagaagcccaaaccccagcatcatgccata

SEQ ID NO: 1344 - DNA, 104 bp, homo sapiens
gtagcagttctgttcagcctactgcaaaaatgctatataaactgcattttttttttttttttttttttttttacaaatggtagcagttctgttcggcctactgc

SEQ ID NO: 1345 - DNA, 92 bp, homo sapiens
actattttgttcaaagttcttagaacaatcactataacatctaacaatcaatataacacatataaaactattttgttcaaagttcttacaac

SEQ ID NO: 1346 - DNA, 166 bp, homo sapiens
gaattacctgacacacacacacacacacattagaattacctgacacacacacacacacacacacacacactagaattacctgacacacacacacacacacacacacacacacacacacacacacacacacacacacacacacacacacacacacacacccctgaaa

SEQ ID NO: 1347 - DNA, 415 bp, homo sapiens
ccctcccggacggagacgctcctcacttcccagacggggtggctgccggacggaggggctcctcacttctcagacggggcggttgccaggcagagggtttcctcacttctcagacggggcggccgggcagagacgctcctcacctcccagacagggttgcggcccagcagaggcgctcctcacatcccagacagggcggcggggcagaggcgctccccactcagatgatgggcgggtcaggcagagatgctcctcacttcctagatgggatggcggcggggaagaggcgctcctcgcttcctagatgggatggcggccgggcagagacgctcctcactttccagactgggcagccaggcagaggggctcctcacctcccagacgatgggcggccaggcagagacgctcctcactt

SEQ ID NO: 1348 - DNA, 92 bp, homo sapiens; identical to SEQ ID NO: 1345

SEQ ID NO: 1349 - DNA, 95 bp, homo sapiens
tataattaaaaataacttattgaacattttcaaatgtatttaatatttgatatggtctattatagggtgattataattaaaaataatttattgaa

SEQ ID NO: 1350 - DNA, 111 bp, homo sapiens
ttaaaatttatttaatttaatttaatatattaaattttatttaattttaaataaatttaaaaaacataatcctttgtaattgtgatttaaaatttatttaattttaaataa

SEQ ID NO: 1351 - DNA, 77 bp, homo sapiens
caaactttcccacatcttcctattttctgagcccttcaagtctctaggaagacacaaactttcccacattttcctat

SEQ ID NO: 1352 - DNA, 99 bp, homo sapiens
gatccttttaatgtgctattgaatttgatttactagtatttaggtgatttactagtatttaggatcctttcaatgtgctattgaatttgatttactagt

SEQ ID NO: 1353 - DNA, 91 bp, homo sapiens
gattacaattcaacatgagatttggatgagagacacagagccaaaccatattatgagccaaatgttgattacaattcaacatgagatttgg

SEQ ID NO: 1354 - DNA, 106 bp, homo sapiens
aggacacttaacagagggagggaaggaagtggccaaaatcagatttactaagaaacgatctggtcaaattatgtctaaggacacttagcagagggagggaaggaag

SEQ ID NO: 1355 - DNA, 94 bp, homo sapiens
tggggggcaagcaccccccaccccttctctccgtgcctctaccctctcttttctctccactttcctggggggcaagcaccccccaccccttctc

SEQ ID NO: 1356 - DNA, 73 bp, homo sapiens
agattagctagatacagagtgtccacacaaaggttctccaagtccccaacagagtagctagatacagagtgtc

SEQ ID NO: 1357 - DNA, 114 bp, homo sapiens
gagaatgtgttggtaagggccactaaatccgatttttgtcagtcctccttgtggtctaggaggacaggcaagggtgcaggttttcgagaatgcgttggtaagggccactaaatc

SEQ ID NO: 1358 - DNA, 128 bp, homo sapiens
ataaattgtgaagatttcatggacatttatcagttcctaaaattaatacttttataatttcttatgcctgtctttactgcaatctctgaatataaattgtgaagatttcatggacatttatcacttcc

SEQ ID NO: 1359 - DNA, 102 bp, homo sapiens
cagtgtggtaactgccagaccatcaggaaacggcctttccctagtgccaactgtgaccagttatcattttagagatacagtgtgataactgccagaccatca

SEQ ID NO: 1360 - DNA, 90 bp, homo sapiens
cattcatcatgctatttgttgcctgttacatacaatgttagtattgagatgtgaggtactgttgcattcatcatgctatttgtttcctgt

SEQ ID NO: 1361 - DNA, 171 bp, homo sapiens
catttacaaacctttagctagacacagagcactgagtggtgcatttttagagtgctgattggtacgtttacaaacctttagctagacacagagagctgattgatgcatttttacagagtgctgattggtgcgtttacaaacctttagctagacacagagagctgattgatg

SEQ ID NO: 1362 - DNA, 181 bp, homo sapiens
tttacaaacctttagctagacacagagtgctgattggtgtgtttttacagagtgctgattggtgcatttacaaacctttagctagacacagagcgctgactggtgtgtttacaaacctttagctagacacagagcactgattgttgcatttacaaacctttagctagacagaaaagttctc

SEQ ID NO: 1363 - DNA, 98 bp, homo sapiens
tatgacaacattataacataaattgtatatgtttagtttatcattgtatatcagctttgacaataggagtatgacaacattataacataaaatgtata

SEQ ID NO: 1364 - DNA, 108 bp, homo sapiens
tttctctccctgtcttattaccagcaaagtctctgctgccttatgtaaaaattcaaaacagtctatgaaatctgcttttagggtttctatccctgtcttattaccagc

SEQ ID NO: 1365 - DNA, 89 bp, homo sapiens
agttactatggatcataaatatgctttgttgattgttttctctcaactagtactattagagttgctatggatcataaatatgctttgtt

SEQ ID NO: 1366 - DNA, 120 bp, homo sapiens
tgtgtagcataacatcgaggattcatcttgttagacctacctgttgtacagtaccctctgtgagaaatttacaattgtgtagcataacattgaggattcatcttgttagacctacctgtt

SEQ ID NO: 1367 - DNA, 80 bp, homo sapiens
agcatttctggatctgctcagctcagctgaggttaggtaaaggatcaggtaaatatcagcatttctggatctgcccagct

SEQ ID NO: 1368 - DNA, 94 bp, homo sapiens
gaagaaaaatacaaaggggaagaaaatttaaagaataagagaacatttaaagaaacttatttaaaggagaagaaaaagacaaaggggaagaaaa

SEQ ID NO: 1369 - DNA, 125 bp, homo sapiens
gaacataaattgtgaagatttcatggacatttattagttccccaaattaatacttttataatttcttatgcctgtctttactgcaatctctgaacataaattgtgaagatttcatggacatttat

SEQ ID NO: 1370 - DNA, 73 bp, homo sapiens
ttccttagaagggaggaacaatgagtatacaaagtatacttgtgtatatttccttagaaaggaggaacaatga

SEQ ID NO: 1371 - DNA, 95 bp, homo sapiens
cacacacactctttaaaagctgattttgtcattttaactccctgatttttcacacacacacatacacccacacaaactctttaaaagctgatttt

SEQ ID NO: 1372 - DNA, 101 bp, homo sapiens
tgagaccacctcagcctggatttctttgtccatatcccaacctttgctccagtttacaacaagttcctcatctccatgtgagaccaactcagcctggattt

SEQ ID NO: 1373 - DNA, 97 bp, homo sapiens
gctctgacagccaatgagccagggcaaattaccaggcacccaggagaaacaggtgtcaaccttggctctgacagccaatgagccagggcaaattacc

SEQ ID NO: 1374 - DNA, 93 bp, homo sapiens
tatgctctctgactataaagaaaataaatcaaaagtcaataacaaagataagttttaaattaagtatgttctctgactataaagaaaataaat

SEQ ID NO: 1375 - DNA, 123 bp, homo sapiens
agacagatgtttcagctgatggagaactgaattaagagttctggctagtacacgttctagttatgaaataagatgaacaaaacagacagatgtttcagctgatggagaactgaagtaagagtt

SEQ ID NO: 1376 - DNA, 83 bp, homo sapiens
atgttacatagtacattcacaagggcagggagggtgtattgtcacaaggacagggaggaatgttacaaagtacattcacaagg

SEQ ID NO: 1377 - DNA, 79 bp, homo sapiens
caaatcatggtaatgtactctcatatatatatattcatatatataaatatatatacatatcatggtaatgtactctcat

SEQ ID NO: 1378 - DNA, 102 bp, homo sapiens
tttgttaatttataaacttacctttaaaattaaacaaaaattacaaacaaaaaacaaaatcataaattttgtttactttgttaatttataaacttaccttta

SEQ ID NO: 1379 - DNA, 130 bp, homo sapiens
ggactgggccacttttcaccatctacactattacgaccccacaatgtaatctatgaactatcctgagagctctaacttaaaaatatatcccggactgggccacttttcaccatctacactattacgaccc

SEQ ID NO: 1380 - DNA, 154 bp, homo sapiens
ttttgttgacctcctggtttttgttgccctctgcaaacaagtggataaaaacaattttgggacagatgacattaagtgcttgacacatactttttagctcgcagtttttgttgacctcctggtttttgttgccctctgcaaacaagtgcataaa

SEQ ID NO: 1381 - DNA, 163 bp, homo sapiens
taggacaaattttatctacttcactctttggccctggggtagtggtgcctgattacaagtcactagaatggaagaagtcctcaggaatactcagtaaatacttcttgatgtaggacaaatttcatctacttcactctttggccctggggtagtggtgcctgat

SEQ ID NO: 1382 - DNA, 116 bp, homo sapiens
ggcggccgggcagaggcgcccctcacctcccggacggggcggccggctggagacggctaacccccccatctccctcacggacggggcggatggccgggcagaggggctcctcactt

SEQ ID NO: 1383 - DNA, 112 bp, homo sapiens
aaatgcaccaatcagcactctgtgtctagctaaaggactgtaaacgcaccaatcagcactctgtaaaatggaccaatcagcactctgtaaaatggaccaattagcgctctgt

SEQ ID NO: 1384 - DNA, 86 bp, homo sapiens
ccatgttgggtggactcagtttctaacggctggcatttgcttattaaaggttgccagactggccatgttgggtggacccagtttct

SEQ ID NO: 1385 - DNA, 86 bp, homo sapiens
taagtaatagaagtaatataagtaatagtattataagatgttatgtaatataagtaatgtaagtaatagtaatataagatgttatg

SEQ ID NO: 1386 - DNA, 75 bp, homo sapiens
gtggggacgtggagaacctttgtgtggacactctgtatctagctaatctagtggggacgtggagaacctttgtgt

SEQ ID NO: 1387 - DNA, 82 bp, homo sapiens
taaagcctgccaccagatgcagctgtacaattggagtacatcaactcacttgccactataaagcctgccaccagatgcagct

SEQ ID NO: 1388 - DNA, 83 bp, homo sapiens
tctgcataataaccagctaacatagaccagttacactataaagtaatcacacaaacaagtctgcataataaccagctaacaac

SEQ ID NO: 1389 - DNA, 91 bp, homo sapiens
cagctgcttcaggataatggggaacatggtaaaactagtgaatggcatgagcaccaattcagctgcttcaggatgatggggaacatggtaa

SEQ ID NO: 1390 - DNA, 107 bp, homo sapiens
agtttagataccagctcaatcacagaaggatagatcagtaagaaaggagaaggaagagtaaaggggactttgtcttgtagtttagataccagctcaaccacagaagg

SEQ ID NO: 1391 - DNA, 96 bp, homo sapiens
tgcctgcggagaggagctacccactgtgggtcttctctcttctgagagctacacactcgtccggacaacttgcctgcggagaggagctacccgctg

SEQ ID NO: 1392 - DNA, 69 bp, homo sapiens
atccaccaatccaccaactcaaagcacaatttaaagtcttttttaaatccaccgatccacccaatccac

SEQ ID NO: 1393 - DNA, 100 bp, homo sapiens
ctttaagttctggggtacatgtgcagaatgtgcagttttgttacacaggtatacacatgccatggtggtttgctttaagttctggggtatatgtgcagaa

SEQ ID NO: 1394 - DNA, 94 bp, homo sapiens
atacaaaaaaaaaaaaaattagctgggtgtggcggcatgtgcctgtggtcccagctactactaaaatacaaaaaaaaaaaaaaaattagctggg

SEQ ID NO: 1395 - DNA, 75 bp, homo sapiens
aatgtcatcggttaaggcaggaacaggccattttcattacttttgtggtggaatgtcatcagttaaggcaggaac

SEQ ID NO: 1396 - DNA, 80 bp, homo sapiens
ctacccagccaacaccttgatgcagccttgtatcttgagcctgttatgaatcctctaaccagccaacaccttgatgcagc

SEQ ID NO: 1397 - DNA, 88 bp, homo sapiens
aaataatgttcagtgaaacatttttttaaaaaaacttatttatattttctaatttttctatgaaaaataatgtttagtgaaacatttt

SEQ ID NO: 1398 - DNA, 120 bp, homo sapiens
tcttctctctgctgccaccatgcaaaggaggtctgtttcccctttgcctgatggtttcataaggcatttttccctgcccttgttagttcttctctctcctgccaccatgcaaaggaggtc

SEQ ID NO: 1399 - DNA, 120 bp, homo sapiens
ttcaactaggtatgtagttttaaggttaacgtttttttgattgcaagggaagggaaggggaaggggaaggggaaggggatatatgaactcttcaactaggcatgtagttttaaggttaac

SEQ ID NO: 1400 - DNA, 125 bp, homo sapiens
taatagactagatcaagcagaagaaaaaaaaaagaaattctagaactgcataatttattaaatgaaatacaaaatacatttgaaagcttcaataatagattagatcaagcagaagaaaaaaaaaa

SEQ ID NO: 1401 - DNA, 101 bp, homo sapiens
aatcaccgctctgtgtctagctaaaggattgtaaatgcacctatcaacactctgtaaaaacgctccaatcagcgctctgtgtctagctaaaggattgtaaa

SEQ ID NO: 1402 - DNA, 125 bp, homo sapiens
tagcttgcatcaaactcactagaaaggctggataagtcattgctaatttatatgtgtaaataggcactctcaaattttgtgtagcttgcatcagactcactagaaaggctggataagtcattgct

SEQ ID NO: 1403 - DNA, 117 bp, homo sapiens
agttacaggtttataaaagtagatgagctttttatttctactatcgtgtatgattattataattttctacacatgctgtcatatgaaagttacaggtttttaaaagtagatgagctt

SEQ ID NO: 1404 - DNA, 102 bp, homo sapiens
atattacacacacactaacatgtgtatattacacacgttagtgtgtatattatacacacactatgtgtatattacacacactaatatgtgtatattacacac

SEQ ID NO: 1405 - DNA, 89 bp, homo sapiens
tttgccctaataccatactgtttttctcaactctttattctgttcttttgatgagttcatctatctttgctctaataccatactgtttt

SEQ ID NO: 1406 - DNA, 105 bp, homo sapiens
gaacctggtacaaagtaaatgcaagatgaaatacaccatactctgtgagtcagcacatgtaaagcgcatgtaacagaacctggtacaaagtaagtgcaagatgaa

SEQ ID NO: 1407 - DNA, 90 bp, homo sapiens
aatcccaacactttgggaggatgaggtgggcagatctgggtgctgtggctcacgcctataatcccaacactttgggaggaggaggtgggc

SEQ ID NO: 1408 - DNA, 100 bp, homo sapiens
gaggttgcagtgagccgagatcacagcactgcactctggcctgggcaacaagagaatcgcttgagtctgggaggcagaggttgcagtgagccaagatcac

SEQ ID NO: 1409 - DNA, 85 bp, homo sapiens
tcatttttggggtactttctaggtttccttataaaatgataataacaaaagtattcatcatttttggggtactttctaggtttcc

SEQ ID NO: 1410 - DNA, 153 bp, homo sapiens
aaaaatatggaagcaattttggaactggataacaggcagaggttggaactgtttggaggtctaagaagaagataggaaaatgtgggaaagtttggaacttcctagagacttggaaggcttagaagacaggaaaatgagggaaagtttggaact

SEQ ID NO: 1411 - DNA, 85 bp, homo sapiens
cctgatattcacaggatgtgtaatactcaagcatcaacgtgtagatttccatagactccctgatattcacaggatgtgtaatact

SEQ ID NO: 1412 - DNA, 99 bp, homo sapiens
tgaaatataacggcattttcttttgggtaattctcttctaaattgtgtgtgtgtgtgtgtgtgtgtgtgtgtgtgtgaaatataacggtattttctttt

SEQ ID NO: 1413 - DNA, 107 bp, homo sapiens
acctacgtattatgaatttaggaaatttcataatatgaatttaggatttcataatttcataattcataatttcataatttatgaattcataacatgaattcataatt

SEQ ID NO: 1414 - DNA, 91 bp, homo sapiens
catctatttatttatttagagacagagtctttatttagagacatctatttatttagagacatctatctatttatttagagacagagtcttt

SEQ ID NO: 1415 - DNA, 119 bp, homo sapiens
agtataatcttttcccaaatataaagtgtcttacttgatgtcatttaatagagtatattatttttaaaaaataatttagaaaacgaacaagtataatcttttcccagatataaagtgtc

SEQ ID NO: 1416 - DNA, 72 bp, homo sapiens
ctgccaacatcacttttaattttatcatctttataagatcattcctccactgccaacatcacttttaatttt

SEQ ID NO: 1417 - DNA, 106 bp, homo sapiens
ctagtgtataaccggctatctagtgaatgatcagcaaatcatgcactcgtttgtaactggccactagtttataactatgcactagtgtataacaggctatctagtg

SEQ ID NO: 1418 - DNA, 86 bp, homo sapiens
taccataaattaatgaagattctacaataaagattcattcttcattctacaatgaagattctacaataaattaatgaagattctac

SEQ ID NO: 1419 - DNA, 106 bp, homo sapiens
ccaaagtgctgggattacaggcataagccaccgtgcctgccctagggatggtttttaaagaaagagatgtgagcttggcctcccaaagtgccgggattacaggcat

SEQ ID NO: 1420 - DNA, 118 bp, homo sapiens
gttgcaggttcttgggcaggggttgtttctgctgctgcattggtgagcgcaactattccgatcagcagggtccagggacagttgcatgttcttgggcaggggttgtttctgctgctgc

SEQ ID NO: 1421 - DNA, 118 bp, homo sapiens
tgggtctgtttgttagcttcattctcacatactgtctaagtactttcaggacattctcttagtttcttaatctttcatgtgggtctgtttgttagcttcattctcacgtactgtctaa

SEQ ID NO: 1422 - DNA, 92 bp, homo sapiens
taaagaactcttgcaactcagtaactcacaaatcatatatctgataaggcatttgtgtctaaactacgtaaacaactcttgcaactcagtaa

SEQ ID NO: 1423 - DNA, 92 bp, homo sapiens
aaatacaaaattagtgggcgtggtggcaaggctgaccaacatggagaaaacccgtctctactaaaaatacaaaattagcgggcgtggtggca

SEQ ID NO: 1424 - DNA, 102 bp, homo sapiens
taagaattcaagaaccattagtttaggggcactgcatataagaattcaagaaccattggtttaggggcatctgcatataagaattcaagaaccattggttta

SEQ ID NO: 1425 - DNA, 157 bp, homo sapiens
gggtttcaccgtgttagccaggatggtctcgatctcctgaccctgtgatccatccacctcagactcccaaagtgctgggctaattttttgtatttttagtagagacggggtttcaccgtgttagccaggatggtctcgatctcctgaccttgtgatc

SEQ ID NO: 1426 - DNA, 97 bp, homo sapiens
tgtggcaagtctatggagattttatacccattaggatgaataaaataaattaaaattaaaaatgaaaataagttgtggcaagtctatggagatatta

SEQ ID NO: 1427 - DNA, 82 bp, homo sapiens
ggaggcagaggtagcagtgagccaaaatcacaccattgctggagaatcgtttgaacccaggaggcagaggttgcagtgagcc

SEQ ID NO: 1428 - DNA, 89 bp, homo sapiens
agtcccagctactcaggaggctgagggaggagaatggtgtgaacccgggagtcgggcgcctgcagtcccagctactcgggaggctgagg

SEQ ID NO: 1429 - DNA, 84 bp, homo sapiens
ttgccatttccaacatatgcttttagtccagtctaatcaccagtctcagactatacattgccattttcaacatatgcttttagt

SEQ ID NO: 1430 - DNA, 88 bp, homo sapiens
tttaaatagacaatgtattttacataaaagctaagtattcttattttaatttttgttacttctctttaatagacaatgtattttacat

SEQ ID NO: 1431 - DNA, 131 bp, homo sapiens
accacactcattttttcttaatatgtaacgtttccccatgttattaaaaattttctaaatccagcaccttagaccactcggccacactaccacactcattttttcttaatatgtaacgtttcccatgttac

SEQ ID NO: 1432 - DNA, 131 bp, homo sapiens
acatggatggaactggagatcattatattaagtgaaataagtgagtactattcagccataaaaaagaatgagattctgccctttgcaactacatggatggaactggagatcattatgttaagtgaaataag

SEQ ID NO: 1433 - DNA, 149 bp, homo sapiens
ctgcttttctgggggaggggcaagtaccccaatcccttctctccgtgtctctaccccttctctgcttttctgggggagaggcaagaacccctcaaccccttctccttcacccttagtggcaagtcccacttttctgggggaggggcagg

SEQ ID NO: 1434 - DNA, 97 bp, homo sapiens
agagacattctccacctgaggtcacactcttgccttcagctatttcaggccatgtcctggctgcagagagacattctccacctgaggtcacactctt

SEQ ID NO: 1435 - DNA, 90 bp, homo sapiens
aaattctgtcatttgcagcaacatggattctgtcaaatgcagcaaattctgtcaaatgcagcaaattctgtcatttgcagcaacatggat

SEQ ID NO: 1436 - DNA, 78 bp, homo sapiens
agattaagaaaacagtgtttaaggaattgatgatttcataagatttatatagattagattaagaaaacaatgtttaag

SEQ ID NO: 1437 - DNA, 102 bp, homo sapiens
ttttttgtagtatattatctctaatataattattttattttaaatattttttcttagtataatatctcttttttttgtagtctattatctctaatataatta

SEQ ID NO: 1438 - DNA, 75 bp, homo sapiens
gttcctgccttaactgatgacattccaacacaaaagaagtgaaaatggcttgttcctaccttaactgatgacatt

SEQ ID NO: 1439 - DNA, 75 bp, homo sapiens
gttcttgccttaactgatgacattccaccacaaaagaagtgaaaatggcctgttcctgccttaactgatgacatt

SEQ ID NO: 1440 - DNA, 125 bp, homo sapiens; identical to SEQ ID NO: 1369

SEQ ID NO: 1441 - DNA, 85 bp, homo sapiens
tattgattgacatttggttttattcaatttcagtttttttaaattgcagatgatgtttatattggttgacatttggttttattca

SEQ ID NO: 1442 - DNA, 112 bp, homo sapiens
aggaagttcattcagttgggataacagtagaggataacagtagaggaataacagtagaggaataacaagaggataacgagaaaggaagttcattcagttggaataacagtag

SEQ ID NO: 1443 - DNA, 103 bp, homo sapiens
taataatagtgcatcaatattgctcaatatgagcaatatattgagcaatattgctcaatataactcaataatgatgttaataataatgcatcaatattgctca

SEQ ID NO: 1444 - DNA, 244 bp, homo sapiens
cttttttcaaaattccttccttccttccttctcttctctccttccttcctttccttctctctttctttctctttctcttttcttgctcttttcttttctttctttctttctttctttctttccttccttccttccttccttccttccttccttccttccttccttccttccttccttccttccttccttcctttttctttccaaatctccttctttctttctttctttcctttcttccttcttt

SEQ ID NO: 1445 - DNA, 75 bp, homo sapiens
ttcaatccctgtgtgtatgcccctttgctgaaatttcccctttgctgtaaattccatccctgtgtgtatgcccct

SEQ ID NO: 1446 - DNA, 111 bp, homo sapiens
gcttctttcttttatattaccttccttggtaatataaatttaaaatttatattggtaatataaatataaatataaagcttctttcttttatattaccttccttggcaatat

SEQ ID NO: 1447 - DNA, 91 bp, homo sapiens
tatgtctcctgattatttgtttcaatgaaagtttgatgaggctgtctagtcactaaccaactatgtctcctgattatttgtttcaatgaaa

SEQ ID NO: 1448 - DNA, 60 bp, homo sapiens
attgacagtgttaaagttgcctggataccatcaacacatggacagtgttaaaggtgcaat

SEQ ID NO: 1449 - DNA, 139 bp, homo sapiens
ataacaaggactatgggtgttatgagccagaaaccatgaactaaaccataaacctatctatctatctatctacatatataggtttaattctgtttaccataacaaggactatgggagttatgagccagaaaccatgaac

SEQ ID NO: 1450 - DNA, 98 bp, homo sapiens
aagatagtttagttttattttagttcttcttattaattcagttatatagttactagttactagtagttactgaagatcgtttagttttattttagttc

SEQ ID NO: 1451 - DNA, 107 bp, homo sapiens
ttctcaatagggttatcatcttgagaagtaaagcctgtcactcatttgggtacaaggaggacttcggggtgatagtttgattctcaatatggttatcatcttgagaa

SEQ ID NO: 1452 - DNA, 110 bp, homo sapiens
tttttttaacaactagaagctgatgttgtaggatcagctctaggatcctctgcccacagtatacagtagaagttaatttatctggtttttttaacaactagaagctgatg

SEQ ID NO: 1453 - DNA, 186 bp, homo sapiens
aggtagatacagagtgttgattggtgcactcacaaaccctgagctagacacagggtgctgattggtgtgtttacaaaccttgagctagatacagagtgccgattggtgtatttacgatccctgagctagacataaagtttctctaaggccccaccacagtagctagatacagagtgtcgattggtg

SEQ ID NO: 1454 - DNA, 82 bp, homo sapiens
tatatatatacatgttttatttaaggttaatttgctattaaacatatatatatatatatatatatatacatgttttgtttaa

SEQ ID NO: 1455 - DNA, 77 bp, homo sapiens
attccataataaaaatctcatctcacaatttaatgtagcatatattaaaaatattccataataaaaatctgatctca

SEQ ID NO: 1456 - DNA, 92 bp, homo sapiens
ttagatatattgtctgtaaattttcttattttatttatttttttagactgaataatactttagatacattgtctgtaaattttcttatttta

SEQ ID NO: 1457 - DNA, 85 bp, homo sapiens
atatgataattgtacatgtgatattttgatacatatgtatcaaatacatttgtacatatgataattgtacatgtgttattttgat

SEQ ID NO: 1458 - DNA, 82 bp, homo sapiens
ggaaagtttggaacttcttagagacttggagggcttagaaaactggaagatgtgggaaagtttggaacttcctagagacttg

SEQ ID NO: 1459 - DNA, 103 bp, homo sapiens
aattgatagctcaaattatttttataaatttaaatggctacaaagactattatatacccttgtatacaattgatagctcaaattatttttacaaatttaaatg

SEQ ID NO: 1460 - DNA, 99 bp, homo sapiens
gtgttgtagcattttattatagtttaaatgttcatttgtaaattctaacccttccagggagtgtgttgtagcattttattatagtttaaatgttcattt

SEQ ID NO: 1461 - DNA, 115 bp, homo sapiens
cccattgatgagcatgttaatgtttataagcaaactgctacatattattcaacaggtggaagaactaaaatatgcttaaatattctcccatggatgagcatgttaatgtttataa

SEQ ID NO: 1462 - DNA, 195 bp, homo sapiens
agattagctagatacagagtgtcacacaaaggttctccaagtccccaccagagtagctagatacagagtgtccattggtgcattcacaaaccctgagctagacacagggtgctgactggtgtgtttacaaaccttgagctagatacagagtgcccactggtgtatttacaatcgtttagctagacataaaggttc

SEQ ID NO: 1463 - DNA, 132 bp, homo sapiens
cacaacctctctctctgtctctctgtccctcctctctctagctgtctctgtctctctttcctgtctcttgctctctctcactatcacttcttttcctctttatttctcctctcctctctctagctgtctctg

SEQ ID NO: 1464 - DNA, 95 bp, homo sapiens
gccagagaacaaataaatatgccttcatgggatgcaatgaccacattacaccttgaaaagtaaaccgccagggaacaaataaatatgccttcatg

SEQ ID NO: 1465 - DNA, 97 bp, homo sapiens
ataccatatttttactatatcttttatttttattatatcttttgtatgtttttatataattttataataaaaataccatatttttattatatctttt

SEQ ID NO: 1466 - DNA, 79 bp, homo sapiens
agcagttcaaatcaatttattcattcacatcattggttagttgggggctcttaagcagttcaaataatttattcattca

SEQ ID NO: 1467 - DNA, 130 bp, homo sapiens
aataatagtaccttcccataggactattgtaagaattaaatgaatattgcctcagtgatctcactgatgacccacccaggaataataatagtacctatcccataggactattgtaagaattaaatgaata

SEQ ID NO: 1468 - DNA, 133 bp, homo sapiens
gaacataaattgtgaagatttcatggacatttatcagttcccaaaattaatacttttataatttcttacgcctgtctttactgcagtctctgaacataaattgtgaagatttcatggacatttatcacttccc

SEQ ID NO: 1469 - DNA, 186 bp, homo sapiens
caggctggggcttccagggctggctattgcattgctatgaagaccggaggccaggttgccttggtgagccccagggtgccggcccaggctgggactccccggggtggtggccactttgttgtggaggccagaaacctggtagacccctgctgggtgccgacacaggctggggctccccggggtggt

SEQ ID NO: 1470 - DNA, 113 bp, homo sapiens
gtccctggaccctgctgattggaatagttgcactcactgacacagcagcagaaacgtctcttgcccaaggacctgcaacagtccctggaccctgctgatcggaatagttgcac

SEQ ID NO: 1471 - DNA, 97 bp, homo sapiens
ctcacgcctgtaatcccagcactttaggaggccgaggcgggcagatcacttgaggttgtggtgactcacgcctataatcccagcactttaggaggcc

SEQ ID NO: 1472 - DNA, 85 bp, homo sapiens
tgaacaaaagtagaacaagactaatcattaggatttaaagagtggctttgaatattaaattgaacaaaagtagaacaaaactaat

SEQ ID NO: 1473 - DNA, 116 bp, homo sapiens
gtctcgaactcctgacctcaggtgatccacctgccaatttttgtatttttagtagagacggggtttcaccatgttggccaggctagtcttgaactcctgacctcaggtgatccacc

SEQ ID NO: 1474 - DNA, 106 bp, homo sapiens
agctagatacagagtgtcgattggtgcattcacaaaccttgagctaaacagggtgctgattagtgtgtttacaaaccttgagctagatacagagtgccgattggtg

SEQ ID NO: 1475 - DNA, 86 bp, homo sapiens
ggtgtggtggggaccttttttttcttgccaaataaatagctacataggtagaaacctttaaggtgtggtgaggaccttttttttct

SEQ ID NO: 1476 - DNA, 90 bp, homo sapiens
tctgtgtcacctcttccaggcctgtccatcctcacgggggctgtctgagggtcaggcgggtctgtgtcacctcctccaggcctgtccatc

SEQ ID NO: 1477 - DNA, 144 bp, homo sapiens
attattatgatattttattacttattgagacagggtctcactctgtctcctaggctagagtgtagtggcgtgaatgtggctcaccatagccctgattattatgatattttattacttatttagacagggtctcactctgtctcc

SEQ ID NO: 1478 - DNA, 149 bp, homo sapiens
cagccgcaggcaggagctacccactttgggtctcctcgactctttgggacaacttgcctgtggaaaggagctacccactgtgggtgtcctctctgctgagaactggacactcattgggatgacctgcctgtggaaaggagctacccact

SEQ ID NO: 1479 - DNA, 146 bp, homo sapiens
gagccataagcagtgagagggagaggatatagcagaggagggagggagagagagagagagagagagggagagagggagagatggagagagagaaggagagagggagagatggagagagagagagagagagagagagagagagaaac

SEQ ID NO: 1480 - DNA, 144 bp, homo sapiens; identical to SEQ ID NO: 1477

SEQ ID NO: 1481 - DNA, 149 bp, homo sapiens; identical to SEQ ID NO: 1478

SEQ ID NO: 1482 - DNA, 157 bp, homo sapiens
ctgaatgcaattaaggaggaggtgagatgattcactccatcttcaccttagtgttcgaatttatttaaaacgttgaacacatcctttggacaggtggtggagagcgctgaatgcaattaaggaggagatgagatgattcactccatcttcaccttag

SEQ ID NO: 1483 - DNA, 152 bp, homo sapiens
ggggttcctgtccctccctcagaaaagcaggacttgccgctaagggtgaaggagaaggggttgaggggttcttgcccctcccctagaaaagtggagaaggggtagagacacagagagaaggggttggggttcttgcccctcccccagaaaag

SEQ ID NO: 1484 - DNA, 85 bp, homo sapiens
catccaagtcttgtaaactcttatttattaaaaagaaaatcatgagattgagtccttattggcatccaagtcttataaactctta

SEQ ID NO: 1485 - DNA, 99 bp, homo sapiens
aggaaatgagttcagagctaggtcatgtaggccattgtagagcatggcaataacaatggaaagagtaccaggaaatgagttcagagctaggttatgtag

SEQ ID NO: 1486 - DNA, 204 bp, homo sapiens
gggattcagccaatcatagaacctccctcctccgcccacagccattggtacacggaagggcatgtgaccacgtgacctagcatcagccaatcacaggacctcactcctctgcccacagccattggtatcgggacgagcatgtgaccatgtgacttagcatcagccaatcataggacctcactcctctgcccacagccattggta

SEQ ID NO: 1487 - DNA, 96 bp, homo sapiens
gctgcttttttagttaccttatcagcataagcattgtcctgagcaatgggatcagccttttgatggctgcttttttagctaccttatcagcataag

SEQ ID NO: 1488 - DNA, 104 bp, homo sapiens
gccctactcttcttaagataaaatctaagcccttggatcaccacaccatcgtcctgcttcaatgatgccctactcttcttaagataaaatctaagcccttggat

SEQ ID NO: 1489 - DNA, 92 bp, homo sapiens
ctggactattaaaacaaatagtctcctatctgttagtacagctctttgtaatcatgcatctggactattaaaacaaatagtcttctatctgt

SEQ ID NO: 1490 - DNA, 112 bp, homo sapiens
aagaaaatgtttgcaaaccacatatctgaaaaaagactaataaggatgaaaagacaagctaaaaactggaagaaaatgtttgcaaaccacatatctgaaaaaaactaataac

SEQ ID NO: 1491 - DNA, 100 bp, homo sapiens
ggaatttctaacatcttgagttagagaatttcttggggtttattaagtgaaacatcttcagttaggaatttctaacatcttgagttagagaatttcttgg

SEQ ID NO: 1492 - DNA, 99 bp, homo sapiens
tatgtgagctaatatatatatatatatatatatatatatatatatatatatatatatattagcgtgtgcgcttatatatatatatatatatatattagc

SEQ ID NO: 1493 - DNA, 100 bp, homo sapiens
tgcctctaagcataacttaaggatgtatgttcaggtttctttgctaaaaagatatgggtactcacctcaatgcctctaagcataacttaagggtgtatgt

SEQ ID NO: 1494 - DNA, 122 bp, homo sapiens
agaagaacatatcaaggcacaaaggattatttttaagccttagatctcaaggagtttgccttgtcatttggacttgcttggagaagaacatatcaagtcacaaaggattatttttaagcctt

SEQ ID NO: 1495 - DNA, 108 bp, homo sapiens
ttctttctactatacctcactcttgtgctttggatgggaattcagccacctcccctttgctagctttggaaataaggtcaccttctttctaccatacctcactcttgt

SEQ ID NO: 1496 - DNA, 93 bp, homo sapiens
ggagaggagacccatagtgggtagcttctttctgtaggcaggtcatctggacaagtgtccaactcttaatggagaggagacccatagtggcta

SEQ ID NO: 1497 - DNA, 100 bp, homo sapiens
tgttatcttttaaagagtggtcagggaagttacttttttaaatgattgttattttaaacaattgttttaaaaaatgttattttttaaagagtggtcaggg

SEQ ID NO: 1498 - DNA, 123 bp, homo sapiens
tgctagatcatagcctatgtgtctatttaatctgacccctgtccaccactcctaaggaacatatgtgagaattcatttggtggaattgctagattatagcctatgtgtctatttaatctgacc

SEQ ID NO: 1499 - DNA, 102 bp, homo sapiens
tattttacttgtagctattttaaatatttgtatttaaataaataaataaataaataaaaacttgtaaataaatacttgtatttacttgtagctattttaaat

SEQ ID NO: 1500 - DNA, 189 bp, homo sapiens
atgcaccaatcagcactctgtgtctagctcaaggtttgtaaacacaccaatcagtgctctgtgtgtagctaaaggtttgtaaacgcaccaatcagtgctctgtgtctagctaatccagtggggacttggagaacttttatgtctagctagacgattgtagatgcatcaatcagcactctgtctctagct

SEQ ID NO: 1501 - DNA, 149 bp, homo sapiens
tttttagtagagacagggtttcatcatgttgtccagactggtctctgacttctgacctcaagtgatcctcctgcctccgccaccacacccagctaatttctctatttttagtagagagagggtttcatcatgttgtccagactggtctc

SEQ ID NO: 1502 - DNA, 111 bp, homo sapiens
cctcctttttattctattcaaatcctcaacagattgaagtcccagctcaagaagaaataatgaattcactcttcctcctttttattctattcaaaccctcaacagattgaa

SEQ ID NO: 1503 - DNA, 97 bp, homo sapiens
ggacaaccagctgcagagaggagctaccctctccagggcctcctctctgctgagagctgcagactatgggacaaccagctgcagagaggagctaccc

SEQ ID NO: 1504 - DNA, 86 bp, homo sapiens
ctcttaatttttgccaatctaaaagagtttctattctaatgcagaacagctgacaagaaatgctcttaatttttgctaatctaaaa

SEQ ID NO: 1505 - DNA, 98 bp, homo sapiens
gcagagaggaggccctggagtgagtagctactctctgcagctggtcatttctgacatctgcagctctcggcagagaggaggccctggagtgggtagct

SEQ ID NO: 1506 - DNA, 80 bp, homo sapiens
atatttctctttgactacagcccagaatataaataaataaaaataatatatatatatatatttctctttgactatagccc

SEQ ID NO: 1507 - DNA, 100 bp, homo sapiens
ctcctatgcatctagttgaatcagttattccttgggtttattgtaatggcctcttttatagacaaaccctcctacgcatctagttgaatcagttattcct

SEQ ID NO: 1508 - DNA, 103 bp, homo sapiens
acagtattgtaatcttatggcacatcattgtttacgcatgtctaaatatatctaaacatagaaaagttaccatcaaaatacagcattgtaatcttatggcaca

SEQ ID NO: 1509 - DNA, 89 bp, homo sapiens
tatgaactgtgcatatttagtgtccaatttgatgagtttcagcatatggaggtaggatggatctcgtatgaactatgcatatttagtgt

SEQ ID NO: 1510 - DNA, 96 bp, homo sapiens
tgggagcatcggagtggacctgtggttggggggacacgcacgtgggtgggtgggggcaggaggggagacatgggagcatcggagtggaccagtggt

SEQ ID NO: 1511 - DNA, 120 bp, homo sapiens
gggtgtctgcccaagtaacagggcaaaagaaaagcagatctaagccaagcaattatgttattagaggttgggaagcgggtgtctgctcaagtaacagggcaaaagaaaagcagatctaag

SEQ ID NO: 1512 - DNA, 91 bp, homo sapiens
acatcacagcaaggaggaggtgatgccacacccgttggcggtactctgcgaattgtcacacatcacagcaagaaggaggtgatgccacacc

SEQ ID NO: 1513 - DNA, 110 bp, homo sapiens
tggctcacgcctgtaatcccagcactttgggaggccaaggcaggtggataaaaaaaaaaaaaatgccgggcatgatggctcacgcctgtaatcccagcactttgggaggc

SEQ ID NO: 1514 - DNA, 238 bp, homo sapiens
tctgcctcagcctcccgagtagctggggttacaggcacacaccaccatgcctggctaattttttgtatctttagtagaggcagggtttcactcgaactcctgacctcatgatctgcctgcctctgcctcccaaagtgctgggattacaggcatgagctaccgcacccggactctttttttcttttgagaccaaggtgattcacctgcctcagcctcccaaagtgctgggattacaggc

SEQ ID NO: 1515 - DNA, 86 bp, homo sapiens
ccactgcccgaaggccaccatccagacgacggggaagccttgatggcctttccggagccactgcccgaaggccaccacccagacga

SEQ ID NO: 1516 - DNA, 108 bp, homo sapiens
tgctctgttgcccaggctggagtgcagtggtgtgacaatggctcactgtaatcccaaactcctgggctcaagtgatctgctctgttgcccaggctggaatgcagtggt

SEQ ID NO: 1517 - DNA, 108 bp, homo sapiens
gctgtccacaaccaatcagattgattgaaggtccagtctttgtttgccactttgtaacttcactccagcctctgaatggctgctgtccacaaccaatcagactgattg

SEQ ID NO: 1518 - DNA, 89 bp, homo sapiens
gcttagtaactaaacaggtctaagaggtatttacatgtggttgattctatcacttatgcttactaactaaacaggtctaagaggtattt

SEQ ID NO: 1519 - DNA, 92 bp, homo sapiens
gtatatagtaattataacaagtatatagtaataatatatatatatataaaacatatatatatataacaagtatatagtaataataacaagta

SEQ ID NO: 1520 - DNA, 100 bp, homo sapiens
gtgtgtaaggggtactggcatcggaatattagatctttgcttggcaacgatcattggtccaggagagtgctggggtgtgtaaggggtactggcattggaa

SEQ ID NO: 1521 - DNA, 124 bp, homo sapiens
cactggaaaactgatcatcagtatttaataagctgaatacatacactctcataccctgctggtgagggtgtacatcgacactggaaaactgatcatcagtatttaataagctgaatacgtacac

SEQ ID NO: 1522 - DNA, 93 bp, homo sapiens
gaggaggtttgggtgacctgcctcttcctctttcacctggccaggctttagcatcttcatctggaggaacaaggaggtttgggtgacctgcct

SEQ ID NO: 1523 - DNA, 118 bp, homo sapiens
gaacataaattgtgaggatttcatggacatttattagttctccaaattttataatttcttatgcctgtctttactgcaatctctgaacataaattgtgaagatttcatggacatttat

SEQ ID NO: 1524 - DNA, 97 bp, homo sapiens
tttagcttctctacctgctatccctttcctctagtcaaattccaaaacgagatatattcaaagaatttagcttctctacctgctatccctttcctct

SEQ ID NO: 1525 - DNA, 105 bp, homo sapiens
tgtttgttgtgtgcttggctgttcagtgccccataactggccgcggtactgccacccgctggaaggggcctgcagggaagtgtttgttgtgtgcttggtgttcat

SEQ ID NO: 1526 - DNA, 108 bp, homo sapiens
cagctactcaggaggctgaggcaggagaatcgtttgatcaggggcagggagcagggtgggcagaggttgcaatgagtcagctactcaggaggctgaggcaggagaatc

SEQ ID NO: 1527 - DNA, 106 bp, homo sapiens
cagggtttgtgggaggcccatggttctggggtccaaagacaggcccagtgctgatttttgtgggtgggcctggtgtcagggtttgtgggaggcccatggtactggg

SEQ ID NO: 1528 - DNA, 92 bp, homo sapiens
ggaagccacagtgtcagtgggggaagccacaatgtcagtgggggaagcttgccattttcagtggaggaagccacagtgtcaatgggggaagc

SEQ ID NO: 1529 - DNA, 131 bp, homo sapiens
ttaaacttactttaaagattaaaataatgcatgatctaatatttttcattgccctggcctctaacatctccaaacactttccccattgataaccttaaacttactttaaagattaaaatgatgcatgatct

SEQ ID NO: 1530 - DNA, 84 bp, homo sapiens
ttgtccctgggctcagtgtcacccagcaaccagaagggacccctcatgtggtggcttgtccctggactcagtgtcacccagcaa

SEQ ID NO: 1531 - DNA, 1805 bp, homo sapiens
ctgagtgtgtgtgatgtgtttgggtgtgactgagtgcatgcatgtctgaatgtgcatgtgatgtctgagtgcgtttctgagtgtgcaagtaatctatgtgtgtgagtgcatgtgatgtgtgtgtgagtgcatgtgagtctgagggtgtgtgtgagtgtaaacaagtgagtatgtgcatctgagtgtgcatgtgatatgtgtgagcaagcatgtgagtgcatgtgagtctgtcaatgtgatctgtgtgtgtgagtacatgtgggtctgtgatgtgtgtgagctagcgagtgcatgtgtctgagtgtgggtgtgatgtataagtaagtttgtgagcacatgtgagtcagtgtgtgtgatgtgtatgagtgggtgagtgcatgtcagtgtgcatgtgatgtgtgtgtataactgagtgcatgtgcatctgagtgtgtgtgtgtgtgcatgtgatatatgtaagcgagtgtgagtgcatgtgggtgtgcatgtgatgtgtctgtgagtgcatgagtctgtggtgtgtgagtgtaagcgacagtgagtgcatgtgtctgtgcatgcagtgtgtgtgtgagtgcatgagtctgtatgtgcatgtgatgtgtgtgtgagtgcatgcctgcgtgtgatgtgttttagtgagtgtgtgagtgcatgtgagtctgtgcatgtaatgtgcatgagtaattctgtgactgcacatgagtctgtgactgcatgtgatatgtgtgagcaagtgtgaattgtgtgtgtggcatgtgtgtaagtgagcatgagtgcacgagtctgcaggtgatgtgagtgtaagcacgtttgagtacatgagtcagtgtgcatgtgatgtgtgtgagcaagtgcatgtgagtctcagtgtgtttgatgtaagcaaatgtttcagtgtgtgtgtgagcaagtgtgtgcatgcatgagtgttcgtgtatatgtgatgtgtatgtaagtgactgcatgtacgtctgagtgtgcatgtgttgtgtgagtttaaatgagtgcatgtgagtctgagtgtgatgtttgtaagtgtaagcaagtttctgagtgcatgttcgtgaacgtgagtggtttgtgaatgtaagcaagtgtatgagtgcatgagtgaatgtgcatgtgatgtgtcagtgattgtgaatgcatgagtctgtgagtgtgcatgtgatatgtgagtgtaattgtgtgagcacgtgtgtgcctgtgatttgtgtgaatgagtgtgtgtgcacgtgagtctgcatgtgcctgtgatgtgcaagtgtgtgggagcccatgtgagtctgagtgtgcatgtgatgtgcaagtgtcagtgagtgcctgtgagtctgagtgtgcatgcaatgtttgtgtgtaagctagtttgtgagtgcatgtgagtctgtgtgcatgtgatgtgtttgtgtgagttcctgagtgtgcatgtgatgtttgtaagtgtaagcaagtgtgtgaagacacgagtctgagtgtgcatgtgatgtgtgtgggccagtgtgagtgcatgtgagtctgagtgtgcatatgatgtgagtgtaattgtgtgcatgtgtgtttgagtgtgcatgtgatatgtgaacaagtgagtgaatgtgagtctttgcatgtgcatgtgatatgcaagtgtgtgagtgcatgagtctgtgcatatgatgtgcgaatgtcagtgtgtgcttgtaagtctgtgcatgtgatgtttgtgtgtgtgagtgcatgagtctaagtgtgcatgtgatgtgtgagcgaatgcacgagtgtgagtctgtgagtgtatgattctgagtgcatgtgatgtgtgt

SEQ ID NO: 1532 - DNA, 114 bp, homo sapiens
gtgctgatgagagagtccacagcagctatctccacagagtacagctggccagtgtaggtttggggacatagggacccccacagtgctgatgagagagtccacagcagctatctc

SEQ ID NO: 1533 - DNA, 97 bp, homo sapiens
gagtcttggggaccaacccagaattccacgttcccacacagtgggagaggggtatgcagggcgtgtacaccagagtcttggggaccaacccagaatt

SEQ ID NO: 1534 - DNA, 108 bp, homo sapiens
gacaccgtgtccctgggtcttggctgtagctgggttgggggcatactctgttgcttgattaaccccagtcttaggtggacaccgtgtccctgggtcttggctgtagct

SEQ ID NO: 1535 - DNA, 95 bp, homo sapiens
gagagtgggtggtgtttgtgtttgtagtggaagcttcattgtcatgtgagtgtgttggttggagagtgggtggtgtttgtgtttgtagtggaagc

SEQ ID NO: 1536 - DNA, 102 bp, homo sapiens
ggcgtgggggggccctctgtggatcgggagtgtgatggccctgtctggagctggcaggcggggggcccctctgaaggtcggagtgtgatgaccctgtctgga

SEQ ID NO: 1537 - DNA, 102 bp, homo sapiens
tccctgcccccatccatccctgatgataactggactcacctcacctctggggtgatgcccccattatccctgcccccatccatccctaatgataactggact

SEQ ID NO: 1538 - DNA, 145 bp, homo sapiens
taacaaactgcaaaacacaaggataaggagaaaaatgtgaaagctacccgggaagacaggataactagaaaccaattcctgtgaagacagcataacaaactgcaaaacacaaggataaggagaaaaatgtgaaagctacccggga

SEQ ID NO: 1539 - DNA, 83 bp, homo sapiens
gtgtgcaagccatccagacccccagccacccctctctcccactctcccgtggtgcgtgtgcaaagccatccagacccccagcc

SEQ ID NO: 1540 - DNA, 114 bp, homo sapiens
gccagctaccacccaccagcctggagcacagctctcctgggggccttggacccatccaccagcctgcaggacagtcctctggggggccttggacccacctaccagcctgcagga

SEQ ID NO: 1541 - DNA, 114 bp, homo sapiens
gtgcatgcaaagacacacaagcacacgtgtgtgtactcatatacagatgtgcacacacacacagagatatacacacaaagacgtgcatgcaaagacacacaagcacacgtgtgt

SEQ ID NO: 1542 - DNA, 87 bp, homo sapiens
cctaatacctgtcttctggaaatcggctccactcctccgtgtgggaccaccccgcctagaactcctaatacctgtcttctgaaaatc

SEQ ID NO: 1543 - DNA, 92 bp, homo sapiens
gctccagggatgtggctggctgatatggcctactcctctagggtcacagctggcctgatatgaccctctgctccagggatgtggctggcctg

SEQ ID NO: 1544 - DNA, 84 bp, homo sapiens
ccctgaggacccccgcccagcccagccccctacacatcagctgtctcgaagcccaccctgaggacccccgcccatcccagcccc

SEQ ID NO: 1545 - DNA, 87 bp, homo sapiens
gcctcaagcagtgtgagctcggggaagaagtccacacaggacacaaagcccagagctgggaaggcctcaagcagtgtgagctcgggg

SEQ ID NO: 1546 - DNA, 94 bp, homo sapiens
aggaagtgagtaggaggtgtgtcagcaaggccacagcaaggggacatgtaggaccctgaccctccttctaggaagtgagtaggaggtttgtcag

SEQ ID NO: 1547 - DNA, 123 bp, homo sapiens
caggaccagcctagatgggctatgttggctgcaggatgcacagaggacagagactgccccaaagggagagggaaggcagagccaggaccagcctagatgggctatgttggctgcgggatgcac

SEQ ID NO: 1548 - DNA, 87 bp, homo sapiens
aaagaaaaggcactatagacagcaaataacaattaagaacccaattacaaaatgggcaaagaaaaggcactaaagacagcaaataac

SEQ ID NO: 1549 - DNA, 140 bp, homo sapiens
caacagtatacgaggtttctggttgctccacagcctcaccgatggaaactccacactgtgttccacaatggctgtaccattttgcgttctgaacaacaacagtatatgaggtttctggttgctccacagcctcaccgatg

SEQ ID NO: 1550 - DNA, 92 bp, homo sapiens
agaagagcaggcatgaggagagccttgtcttcagagctgagaccttcacgtgcccagccaggaacaaagaagagcaggcctgaggagagcct

SEQ ID NO: 1551 - DNA, 95 bp, homo sapiens
cattttacaaacctcttgctagctacagggcactgattggtgtgtttttacagagcactgattggtgcattttacaaacctcttgctactacaga

SEQ ID NO: 1552 - DNA, 98 bp, homo sapiens
ctcggcggaaagacgctgcctcacgaggccccgcaatgctcagccgttgggttgggggaaacagtgctcggcggaaagacgctgcctcaggaggcccc

SEQ ID NO: 1553 - DNA, 87 bp, homo sapiens
agaggcctccctgcctctgggatccctgcttggtgaactgggatctctgaggagccaagaggcccccctgcctctgggatccctgct

SEQ ID NO: 1554 - DNA, 90 bp, homo sapiens
cacaaactgcagttacccacagtgagaaggatacaataaaggcccaacacagcacaaaacactccacaaactgcagttacgcacagtgag

SEQ ID NO: 1555 - DNA, 114 bp, homo sapiens
ggcaggggaaggagtatggaggccgagatcatccagagatgctgggctggccggggagcagggcacgcaggggaggcaacagtgcgtggcaggggcaggagtatggaggccgag

SEQ ID NO: 1556 - DNA, 98 bp, homo sapiens
tggcctcccctcccaaaccctggacctcagtgagcctgggtactggggctagctggacgtgctgacccttcctggcctcccctcccaacccctggacc

SEQ ID NO: 1557 - DNA, 136 bp, homo sapiens
gctgcactcaggtcgggctccccgcacaggcctggccccatccccacaccccttcctgccccatccaccccctcgcctcaccccgctgcactcaggtcgggctccccgcacaggcctggcccccatccccacaccc

SEQ ID NO: 1558 - DNA, 75 bp, homo sapiens
atttacatggggcttcttgatggaaataccggcctgcaactgcagctcccatttacgtggggcttcttgatggaa

SEQ ID NO: 1559 - DNA, 132 bp, homo sapiens
tctaaaataaagagctctgacaactgaacaataaaaagacaaacaacccagttcagacatgggcaaatcatacctgatcagagacccatatctaaaataaagagctctgacaactaaacaataaaaagacaa

SEQ ID NO: 1560 - DNA, 75 bp, homo sapiens
acctgctgtgtgccgggcactgtccatttagtcaacagatgacttactgagtacctgctgtgtgccgggcactgt

SEQ ID NO: 1561 - DNA, 98 bp, homo sapiens
taccagtcattctcacctgaaactacgctaatcccattaccagtcattctcacctgaaactacgctaatcacgctatcagtcattctcacctgaaact

SEQ ID NO: 1562 - DNA, 89 bp, homo sapiens
ccactgccctccagcctggcgacacaacctggcaggtggaggttgcaatgagctgagatcacgccactgcactccagcctggcgacaca

SEQ ID NO: 1563 - DNA, 76 bp, homo sapiens
ctcaccatccccacggacagctctcgatgtggccgtgcctgtgtctggcagcctcaccatccccacggacggctct

SEQ ID NO: 1564 - DNA, 113 bp, homo sapiens
atgcccatgaggtgccacaagggactctcggaccactactcaccttccctgccctgtcccttgggatcaggacggctttggctaatgcccacgaggtgccacaagggactctc

SEQ ID NO: 1565 - DNA, 136 bp, homo sapiens
ggggtttcaccatgttggccaggctggtcttgaactcctgacctcaagcgccaccatgcctggctgaatcagtatttttagtagagatggggtttcaccatgttggccaggctggtcttgaactcctgacctcaag

SEQ ID NO: 1566 - DNA, 105 bp, homo sapiens
caaacctcagtaggaatcagaagtgttggccgggcgcggtctgcctgtagctatcgagcaggctgtcagactccagaaccaaacctcagtagaaatcagaagtgt

SEQ ID NO: 1567 - DNA, 103 bp, homo sapiens
gaggtgggaggaggaaggtggtgtgggagtggggcggggaagcaggctgtcctcccatcttcagcactgcagctgggctggagatgggaggaggaaggtggtg

SEQ ID NO: 1568 - DNA, 80 bp, homo sapiens
acacgggcggcccctccacccacccctgcaccaccttcgtcacacccacatttaaacacgggcggcccctccacccaccc

SEQ ID NO: 1569 - DNA, 82 bp, homo sapiens
ccccctgctggcgccggggcactgcagggccctcttgcttactgtatagtggtggcacgccgcctgctggcagctagggaca

SEQ ID NO: 1570 - DNA, 228 bp, homo sapiens
cctgctgaatggtccattttataaagtgctgattggtccattttacagagtgctgattggtccattttacagggtgctgattggtacatcttacacagtgctgattggtacattttacaaacctctcactccctacagagcactgataggtgtgtttttacagagtgcagattggtgcattttacaaacctcttgctagctacagagcgctgattggtgcattttaca

SEQ ID NO: 1571 - DNA, 94 bp, homo sapiens
tctacaaggtacagcatgcaagctctttgcagtggctacatatacaacagataattgaaacgtctacaaggtacagcatgcaaactctttgcag

SEQ ID NO: 1572 - DNA, 124 bp, homo sapiens
aaagtgataactcagctaatattcttatttcttcaccctcattgagattttctatgaaatatcatttggagaacatttcttattataatgaaaagtgataactcagctaattttcttatttctt

SEQ ID NO: 1573 - DNA, 80 bp, homo sapiens
aaaaccttcccttagctgtggtaataccacacacacacgcacacacacacacacaaaaccttcccttagctttggtaata

SEQ ID NO: 1574 - DNA, 98 bp, homo sapiens
tttaaattttaagcattctacaaatgttatctctcaggtcctaggtcttaggtttttctcatagtttgactttatattttaagcattctacaaatgtt

SEQ ID NO: 1575 - DNA, 95 bp, homo sapiens
tcttaaacaacagaaaacacagttcgaagggtctatgttcagctgtgcatgtattgtcttgataaacgtcttaaacaacagaaaacagagttcga

SEQ ID NO: 1576 - DNA, 104 bp, homo sapiens
tcaatgctataatagttttggaaactgaagaaggatattactttttgaaaaatttgaaaaaatgctttcagaacttactcaatgctataatagctttggaaact

SEQ ID NO: 1577 - DNA, 77 bp, homo sapiens
acctgtgaatatgtgggcttgcatgacaaaaggaatgacctgtgaatccccatgacctgtgaatatgtgggctttgc

SEQ ID NO: 1578 - DNA, 129 bp, homo sapiens
gtatatatttaagttacacaacatgaggttttgatatgtatattgtgtgtttatacatattcctttctttattgttaaattttatggtatatatttaagttatacaacatgaggttttgatatgtatat

SEQ ID NO: 1579 - DNA, 117 bp, homo sapiens
gtccctggaccctgctgatcagaatagttgtgctcactgatgcagtagcagatccccctcttgcccaagaacccataacagtccctggaccctgctgatcagaatagttgagctcac

SEQ ID NO: 1580 - DNA, 104 bp, homo sapiens
gcttccaaatggcctaactttgcttccaaatggcctaactttggaattataagcttccaaattattatttggaattataagcttccaaatggcctaactttgca

SEQ ID NO: 1581 - DNA, 99 bp, homo sapiens
tgtagatatcccaaaataatttgtcctcctgtcttctttccacgatctctttcacctcactttccagatactgtagatgtcccaaaataatttgtcctc

SEQ ID NO: 1582 - DNA, 83 bp, homo sapiens
tttgtatcagtaccatgctgttttgatgactatagcctttaatatagtttgaagtctttgtatcagtaccatgatgttttgat

SEQ ID NO: 1583 - DNA, 110 bp, homo sapiens
acacacaccacaggtatgtattatataggaagatattaggaaaatgtatgtgtatgtatacgcacatagacctatatatacatacacacaccacagatatgtattatata

SEQ ID NO: 1584 - DNA, 80 bp, homo sapiens
acacctttgctttctgatgattttaaacaaccaatcgtccacgttggcagcttagcaacacctttgctttctgatgattt

SEQ ID NO: 1585 - DNA, 88 bp, homo sapiens
aaattctacaattttctcagtattcttagaattaataaattattcaatattcaatattgataaaatatttctcagtattcttagaatt

SEQ ID NO: 1586 - DNA, 100 bp, homo sapiens
ttgttgttaactatagtcaccctactcttctatcaaacattcaaactttttctgcaattaacttatgttgtttttaactatagtcaccctactcttctat

SEQ ID NO: 1587 - DNA, 127 bp, homo sapiens
tcaaatatgagtatgtaatatatcagttgcttgaatgctgtgatatgatgggagggagagtgagagagtggttaaattaatcaaatatgagtatgtaatatatcagttgcttaaatgctgtgatatg

SEQ ID NO: 1588 - DNA, 76 bp, homo sapiens
acagggcacatgatattaaggccacatgtacttgactctagcttcacctgtgacagggcacatggtattaaggcca

SEQ ID NO: 1589 - DNA, 115 bp, homo sapiens
gcaccccttccagttgtgacaataacaatgtcttcagacacttccctggcctctttccaacagttgccagtagcaccccttccagttgtgacaataacaatgtcttcagacactt

SEQ ID NO: 1590 - DNA, 116 bp, homo sapiens
ccagccgtaggcaagagtggagtggaagggaagtggtaaaccgagcatcacacccaatctattgcaaatctggtagtatccagtccagccttaggcaagagtggagtggaagggaa

SEQ ID NO: 1591 - DNA, 111 bp, homo sapiens
cccccctctccccacctggatattacgatccacatcgcaggggggcgggcgcctcccgcgatgcggggagtaatatcacccccctctccccacctggatattacaatccac

SEQ ID NO: 1592 - DNA, 105 bp, homo sapiens
gagtaaacagatggccttgtcgtattgtttaacactatatgaataaatgaacggaagaataaatggatgaatgagtaaacagacggccttgtcgtattgtttaac

SEQ ID NO: 1593 - DNA, 83 bp, homo sapiens
ggattctgtttagttgaggaggagacagtacaatttcagtacactgtataaattcaggattcgtttagttgaggaggagacag

SEQ ID NO: 1594 - DNA, 603 bp, homo sapiens
ttgcttctacccattcatccattcacccatatacatatcttcctgcccatccatccacttattcttctgtccctccatccttttgtccacccatctactcactcattcatccatctctctctccactcctccaccaaaccatccacctatccatctatccatccatccagccatccatccatccatccacccatccatccatccatcctcccacccacccacctatccatgcatccatccatctacccacccatctatccatccacccatctatccatccatccatccatccactcatccacctatccatccatccatccatccatccatccatccatccatccatgcatgcatccatccacccacccacctatctattcattcactcacaaatccatccatccatccatccatccattcactcacccacaaatcgatccatccatccacccatccatccatccatgtgcccatccacccacccattcatctcttcacccacctatccatccatccatccaccaccctacaaattccttccttccttccttccttccttccttccttccttccttcgttccttccttccttccttccttcttt

SEQ ID NO: 1595 - DNA, 186 bp, homo sapiens
atctgggttttctttctttctttctttctttctctctctatctctctctctctctctccttccttccttccttccttccttccttccttccttccttccttctttctttctttctttctttctttctttctttctttctttcttttctttctttctttctttctttctttctttctttctttttct

SEQ ID NO: 1596 - DNA, 107 bp, homo sapiens
agttggtgtatagatagtgtatagatatcccagctctgttccctctcagctaatgattgatgggtgttggcagttggtgtatagatagtgtatagctatcccagctc

SEQ ID NO: 1597 - DNA, 97 bp, homo sapiens
aaatatattatcctttttctatattgctggattcaatttgttaatattttgttgaagatttcaaatcttcaaacaaatatattgtcctttttctata

SEQ ID NO: 1598 - DNA, 134 bp, homo sapiens
atgtccatattaaaatgaaatcttcacaatttatgttcagagattgaagtaaagacaggcataagaaattataaaagtattatttgggaactgatatatgtccatattaaaatgaaatcttcgcaatttatgtt

SEQ ID NO: 1599 - DNA, 124 bp, homo sapiens
atttgtttgtttgtttttgagacggattatttatttatttgagtcggagttttgctttttgtcgcccaggctggagtacagtggccagatttgtttgtttgtttttgagatggattatttattt

SEQ ID NO: 1600 - DNA, 111 bp, homo sapiens
gcctgggctagaacctgtctccaaaaaaacaaaacaaaaacaaaaaaacaaacgtaaaatacaccattgcactctggcctgagctagaacctgtctccaaaaaaacaaaac

SEQ ID NO: 1601 - DNA, 104 bp, homo sapiens
gcaggagtgtgaatgtttcctgactataagaatatacatactataaaaacatacatatttcccgactataacaacgtccagcaggagtgtgaatgtttcctgac

SEQ ID NO: 1602 - DNA, 87 bp, homo sapiens
ctcaagatgcagtaggccccagccccaggagggtccctacatcttccaggcccctaggagggtcctcaagatgcagttggccccagc

SEQ ID NO: 1603 - DNA, 98 bp, homo sapiens
tattaggttggtgcaaaagtaattgcaccaaaaccgttcagctcccactggctatagtggcttccctggcatctattaggttggtgcaaaagtaattg

SEQ ID NO: 1604 - DNA, 65 bp, homo sapiens
cctccggagtagctgggactacagcctcagcctcagcctcagcctcccaagtagctaggactact

SEQ ID NO: 1605 - DNA, 102 bp, homo sapiens
gatgaatgtgaagttacaaagtgtaaatggagaggatgttacttggagtgtgtgggctacggaaatggagaagatgaatgttaagttacaaagtgtaaatgg

SEQ ID NO: 1606 - DNA, 86 bp, homo sapiens
gctgagcaggagcccagtgccccttatgccagtttagagcacctgggttccgaggcaagaggctgagcaggaacccagtgcccctt

SEQ ID NO: 1607 - DNA, 101 bp, homo sapiens
accactcacatccacagtgcacaccacgtacacctactcacctgctcacactcatttactctcatgctcacatgctcaccactcacacccacagtgcacac

SEQ ID NO: 1608 - DNA, 98 bp, homo sapiens
aaccagccttttgtttcattgatattttgtattttgtgtttaaatttgttcaaactaaattcaaccgaaaccagccttgtgtttcattgatattttgt

SEQ ID NO: 1609 - DNA, 91 bp, homo sapiens
tgacacgctgcctccggcctcctccattccacgtacactgaaggcaccgccacgatgctgacacgctgcctccggcctcctccattccacg

SEQ ID NO: 1610 - DNA, 124 bp, homo sapiens
aagattggcaattggaagccttgcctcatttctctgctccttctcttaaaaaaaatttgctctccatacagatgcatttaaatgagtgattaagattggcaattggaagccttgccacatttct

SEQ ID NO: 1611 - DNA, 114 bp, homo sapiens
cccacctcggcctcccaaagtgctgggattataggcatgagccaccgcgcctggccagtcttatctcttgaccttgcaatctgcccacctcagcctcccaaagtgctgggatta

SEQ ID NO: 1612 - DNA, 167 bp, homo sapiens
ctgtgctatcctgtactataccataccatacatattgtatttcactatactatgctttattgtgcttcattgtactgtactatactataccacactacactatcctatcctatcctaccctaccctaccctaccctaccctaccctaccctatcctatcctatccta

SEQ ID NO: 1613 - DNA, 83 bp, homo sapiens
gattatcaaaagtgagtattgacaattctgccctgtctcctatagaaatacaaagattatcaaaagtgagtattgacaattct

SEQ ID NO: 1614 - DNA, 92 bp, homo sapiens
ggttcattttgcttgctgcccagatagagccagatcgggacctctttccagtaacacaatggttcattttgcttgctgcccagatagagcca

SEQ ID NO: 1615 - DNA, 79 bp, homo sapiens
actttcccacattttcctgtcttctgagccctccaagtctctaggaagttccagactttcccacattttcctatcttct

SEQ ID NO: 1616 - DNA, 105 bp, homo sapiens
aaaagcagaaccactgataagggtctaacaaagatcacatgcttctgagggaacagggcaaagggcaaaagcagaaccactgataagggtccaacaaagatcaca

SEQ ID NO: 1617 - DNA, 127 bp, homo sapiens
tgtatccaccacatgcttagagaggttacatccaccacaagcttagagattctgtatccaccacaggcttagagaggttgtatccatcatacagttatgttgcatccaccatacatctagagatgtt

SEQ ID NO: 1618 - DNA, 87 bp, homo sapiens
gcatgtactcctgaacttaaaatttggttacttaagtttacctatataacacacctgtgcatgtactcctgaacttaaaatttggtt

SEQ ID NO: 1619 - DNA, 110 bp, homo sapiens
acattttaaaaaattatctgtaggaaaaattatctgtttccctttccccatcaagaggctagagataatgaaaataatggtggggacatttaaaaaattatctgtaggaa

SEQ ID NO: 1620 - DNA, 102 bp, homo sapiens
agtcttcatgatttacattaaaattatttatttaaaattatgttgttgctgttaagatttatttgaagaagtacatccagtcttcatgatttgcattaaaat

SEQ ID NO: 1621 - DNA, 103 bp, homo sapiens
gctgctattaaaattaaacaattgcgtgatttccatgcatttacctttttctaagagaaatgatcagttctgatacatgctgctattaaaattaaacaagtgc

SEQ ID NO: 1622 - DNA, 92 bp, homo sapiens
agacaacagtcactttgcaacctccagtatgcctgagatgaaactctccccccaactggagagtatctcagacaacagtcactttacaacct

SEQ ID NO: 1623 - DNA, 107 bp, homo sapiens
attattgattatatgcaaataagatacatacgaatctttgtgctaaaacttgaaggctaatttttcaaatttattgattattgattatatgcaactaagatacatac

SEQ ID NO: 1624 - DNA, 78 bp, homo sapiens
ttccaaactttcccacatcttcctaccttctgagccccccaagtctctaggaaattccaaactttcccacattttcct

SEQ ID NO: 1625 - DNA, 112 bp, homo sapiens
gggttcttgggcaagaggtgtttctgctgctgtgtcggtgagcacaactattccaatcagcagggtccagggaccgttgcgggttcttgggcaagaggtgtttctgctgctg

SEQ ID NO: 1626 - DNA, 96 bp, homo sapiens
accaatcagcgctctgtgtctagctgaaagattgtaaatgcaccaatcagcactctgtaaaaacataccaatcagcgctctgtgtctagctaaagg

SEQ ID NO: 1627 - DNA, 86 bp, homo sapiens
tttatctaatgtaagaatagtgacacctgcttttttttgtttcccatttgtttaaagtctgctttatttaatgtaagaatagtgac

SEQ ID NO: 1628 - DNA, 80 bp, homo sapiens
attttatgtatatgttaattcaaattcaaagagtgtattttttgtacatgtaaattctatctatatgtaaattttatgta

SEQ ID NO: 1629 - DNA, 106 bp, homo sapiens
ttataaatgaatgtaactgatatgttttattgatacattacaatgctgtatgatattgatacatgataatgatattcatacattataaatgaatgtaactgatatg

SEQ ID NO: 1630 - DNA, 79 bp, homo sapiens
ttatttgactctattacttctgtctgttattagttgttctaagtattacccattatttgactttattacttctgtctgt

SEQ ID NO: 1631 - DNA, 76 bp, homo sapiens
cagcctggccaacatggtgaaaccccatttctactaaaaaaaaaaaaaaaatccagcctggacaacatggtgaaac

SEQ ID NO: 1632 - DNA, 125 bp, homo sapiens
gaacataaattgtgaagatttaatggacatttattagttccccaagttaatacttctataatttcttacgcatgtctttactgcaatctctgaacataaattgtgaagatttcatggacatttat

SEQ ID NO: 1633 - DNA, 236 bp, homo sapiens
ttgtaaatacaccaatcagcagtctgtgtctagctcaaggtgtgtaaacacaccaatcagcaccctgtgtctagctcaaggtttgtaaatgcaccaattggtgctctgtgtctaactaatctagtggggacttggagaacttttgtatctagctcagggattgtaaatgcaccaatcagcaccctttcaaaacggaccaatcagctatctgtaaaacagaccaatcagctctctgt

SEQ ID NO: 1634 - DNA, 125 bp, homo sapiens; identical to SEQ ID NO: 1632

SEQ ID NO: 1635 - DNA, 161 bp, homo sapiens
aaatgcaccaatcagcgctctgtgtctagctaaaggattgcaaacgcaccaatcatcactctgtaaaaatgcaccaatcagcactctgtaaaatgggtcaatcagcactctgtaaaatggaccaatcagccccctgtaaaatggacaaatcagcaggatgt

SEQ ID NO: 1636 - DNA, 93 bp, homo sapiens
gctagctacagagcactgatgggtgcgattttacaaagcgctgattggtgcattttacaaacctcttgctagctacagagcactgattggtgc

SEQ ID NO: 1637 - DNA, 100 bp, homo sapiens
atgcaaactctggaggaatttgctttataactttagctttataaacatatacaaaataattccgctttataaactagatgcaaactctggaggaatatgc

SEQ ID NO: 1638 - DNA, 146 bp, homo sapiens
tgacaaattttactcattctttctccttttagctcaactgccacttgtctctgacaaattttactcattcttttttttccaagattgaacactatttcttctatagcatttcattttgttgctgataactcttttacatgcttcct

SEQ ID NO: 1639 - DNA, 82 bp, homo sapiens
catgggcgtatggaggaaatgagaaagggtaataagatatatggcctcacactccatgggcatatggaggaaatgagaaagg

SEQ ID NO: 1640 - DNA, 86 bp, homo sapiens
agaaaatgagaaaatgtttgcattatgtcattggattgcagaaagaacagtacttatgagaaaataagaaaatgtttgcattatgt

SEQ ID NO: 1641 - DNA, 98 bp, homo sapiens
atttttataataagcaaacactaagaatatttttaatatttttcacttccttttaacttcctctacttctctaaatttttataataagcaaacactaa

SEQ ID NO: 1642 - DNA, 99 bp, homo sapiens
attcaaaataactgtctcaactttgtcttaatgcttataatttcctttcagcattttataattagatccagaaattattcaaaataactgtctcaactt

SEQ ID NO: 1643 - DNA, 136 bp, homo sapiens
agactggataaagaaaatgtggcacatatacaccatggaatactatacaatagcaaaccaacccaaatgcccatcaatcatagactgggtagactggataaagaaaatgtggcacatatacaccatggaatactat

SEQ ID NO: 1644 - DNA, 91 bp, homo sapiens
gactaaatgcggtaaaaccagcaacttcacaacttcttgttgtgaatgcggtaaaaccaccaactaaatgcggtaaaaccgactaaatgcg

SEQ ID NO: 1645 - DNA, 103 bp, homo sapiens
aggtagctactttttatccctgccatcctaagcggtcaccctttttctttattcttttcctcttaagcctctggaggtagctactttttacccctgccatcct

SEQ ID NO: 1646 - DNA, 97 bp, homo sapiens
agcagagaggagaccctggagtgggaagcaccttgttgtgggcaggttgtcatcccactctctggagctctcagcagaggggagaccctggagtggg

SEQ ID NO: 1647 - DNA, 108 bp, homo sapiens
ctcaacttgaacatttctattaaagtttctatatttcaatattaataacttctaacttcaattgtaacaccttctcaacttgaacatttctattaaagtatctatatt

SEQ ID NO: 1648 - DNA, 86 bp, homo sapiens
tgtatacttccaatttattccatttgtagaatttggataagaatttttaagatttccatgtatacttccaatttactccatttgta

SEQ ID NO: 1649 - DNA, 84 bp, homo sapiens
aatgcattgatataatcaaatacccatagtcacttttacacctaaaaacattaataacaatgcactgatataatcaaataccca

SEQ ID NO: 1650 - DNA, 128 bp, homo sapiens
gaacataaattgtgaagatttaatggacatttatcagttcccaaaattaatacttttacaatttttttatgcctgtctttactgcagtctctgaacataaattgtgaagatttcatggacatttatca

SEQ ID NO: 1651 - DNA, 136 bp, homo sapiens
tttgggaactgataaatgtccatgaaatcttcacaatttatgttcagagattgcagtaaagacaggtgtaagaaattataaaagtattaattttgggaactgataaatgtccatgaaatcttcacaatttatgttc

SEQ ID NO: 1652 - DNA, 95 bp, homo sapiens
tttggttttgaaaggtgtctgagtcacttaagaatcacagggttctgtgcttgaggaagagctactttggtgttgaaaggtgtctgagtcactta

SEQ ID NO: 1653 - DNA, 75 bp, homo sapiens
acacaaaggttctccacgtccccaccagattagctagatacagagtgtacacacaaaggttctccacatccccac

SEQ ID NO: 1654 - DNA, 94 bp, homo sapiens
cattattctgggtggtagttcaaagtgtataaacatgtaaatgttctatattttgacagagcattattttgggtggtagttcaaagtgtataaa

SEQ ID NO: 1655 - DNA, 75 bp, homo sapiens
acatcctgctgactggtccattttacagagagctgattggtctgttttacagagagctgattggtccattttgac

SEQ ID NO: 1656 - DNA, 187 bp, homo sapiens
acagagcactgattggtgcatttacaaaccttgaactagacacagggtgctgattggtgtgtttacaaaccttgagctagacacagagtgctgattggtgtatttacaatcctttagctagacataaaggttctccaagtccccactagattagctagatacagagtgctgattggtgcatttacaa

SEQ ID NO: 1657 - DNA, 97 bp, homo sapiens
gtggtcacaattagggcacaagttgctttagagccctggttctcaactgcaacatctataaacatttatggtggtcacaactagggcacaagttgct

SEQ ID NO: 1658 - DNA, 84 bp, homo sapiens
gggtgggcagcagtgtaaaatttgtgtatgcaattgtaacaataaaaacttagaattgggtgggcagcagtgtaaaatttgtgt

SEQ ID NO: 1659 - DNA, 148 bp, homo sapiens
tcccattccccgctttataactgcctcctctcttggactcacttctccagctcctccagtgtcttctctcttcccatctttcttagaaagacaagattatcccattccccgctttataactgcctcctctcttggactcacttgtcca

SEQ ID NO: 1660 - DNA, 449 bp, homo sapiens
attcacactggaaaaagatcttatgagtgtggacaatgtgggaaatgttttagacaaaagggcaacctcattcaacaccaacgaggtcacactggagaaaggccttatgagcgcaggaaatgagggaaatcttttaggaacaggtctcacctcctcactgatcaccagaaacttcatactggagaaagaccttatagttgtggggaatgtgggaaattattttacaagaagtctcacttccttctacctgagagagttcacactggagaaaggccatatgagtgtgaggtatgtgggaaattacttagccagaaggagcatgttactgtgcatcagagggttcacactggagaagggccatatgaatgcaatgaacatgggaaatcattttcttacagctctgcacttcgtgttcatacaagaattcacactgggtaaaagccttatga

SEQ ID NO: 1661 - DNA, 148 bp, homo sapiens; identical to SEQ ID NO: 1659

SEQ ID NO: 1662 - DNA, 125 bp, homo sapiens
gagggattgcgaggcatgctcaaaatcccacaactgcgcaaaaataggacaaacagaaatatgttcactcagtgattagaactcggagggattgtgaggcatgctcaaaatcccacaactgcgca

SEQ ID NO: 1663 - DNA, 124 bp, homo sapiens
cctggactccagtgctgactaatttgattctcaagttagctggtagagagaacggggtatataaatgtacactgtgccctggactccagtgctgactaatttgattctcaagttagctggtaga

SEQ ID NO: 1664 - DNA, 74 bp, homo sapiens
aaatccatagaaacagaaagtagagtttgtgggaaatgtccagaatgggtaaatccatagcaacagaaagtaga

SEQ ID NO: 1665 - DNA, 109 bp, homo sapiens
gaactcacagtagaaaggccttatgagtgcaaggaatgtgggaagtcctttgctgtaactccagtctcatttgacacaggagagttcacactggagaaaggctttaaga

SEQ ID NO: 1666 - DNA, 119 bp, homo sapiens
taacaaaaaaattagaaatcaattaagaatttaagaaaaattaagaattttattaagttgttttttatcaaaaaaaaaaaaaacccttgtattaagaaaaattaagaattttttaagtc

SEQ ID NO: 1667 - DNA, 91 bp, homo sapiens
tcaagcattaattgacattagagtcaattcagcattgacttgagtttcagttgacttgacattgagttcaagcattaattgacattaaagt

SEQ ID NO: 1668 - DNA, 141 bp, homo sapiens
tgtaacatgctttggtcaatgaaccggagcagaggagatatgcgtcaactccgggagaaaggctttcagggccagtgaggctttaatctgtcaggtccatgtaacatgctttggtcaatgaactggagcagaggagatatg

SEQ ID NO: 1669 - DNA, 141 bp, homo sapiens
aatcctttagctagacacagagtgctgattggtgcatttacaatcctttagctagacacagagtgctgactggtgtgtttttccagagtactgattggtgcatttataatcctttagctagacacagagtgctgattggtg

SEQ ID NO: 1670 - DNA, 73 bp, homo sapiens
agatagatatgcaggagttgaaaaataggcaggcaggtagatagacagagagatagatatgcaggaattgaaa

SEQ ID NO: 1671 - DNA, 88 bp, homo sapiens
taaaggccgaaaatgacttaactgccagtaaagttcaactgtttaggccatctgctaatttatctaaaggcctaaaatgacttaactg

SEQ ID NO: 1672 - DNA, 130 bp, homo sapiens
gtggctcatgcctgtaatcccagcactttgggaggccaagacaggagcatcacttgaggccaggagtttaagaacagcctggggccgggcgcggtggctcacgcctgtaatcccagcactttgggaggcc

SEQ ID NO: 1673 - DNA, 84 bp, homo sapiens
gaagaggaaactatggcatagaaaagtggcaggtcccattaatatccccattttgaggaagaggaaactatggcatagaaaagt

SEQ ID NO: 1674 - DNA, 103 bp, homo sapiens
gtttctgctgctgcgtcggtgagggcaactattccgatcagcagggtccagggactgttgcgggttcttggacaggggttgtttctgctgctgcgtcagtgag

SEQ ID NO: 1675 - DNA, 86 bp, homo sapiens
attactatttgcctggtatatcaatagtaatagtaataggtatatcaataatagtaaaactattactatttgcatggtatatcaat

SEQ ID NO: 1676 - DNA, 83 bp, homo sapiens
tgcactccagcctgggcgacaagagcaaagacctgagcaaagagctgagaccactgcactccagcctgggcgacaagagcaaa

SEQ ID NO: 1677 - DNA, 116 bp, homo sapiens
ccaccatatttagaataaaatcctatgatgttatacctccaccatatttagaataaaatcctatgatgttatacctgcccagttactgccaccacatttagaataaaatcctatga

SEQ ID NO: 1678 - DNA, 98 bp, homo sapiens
ctggggcccatttctgagatgcaccagaagttaatcaactttttagtgtcagaagacgcttatttgatccctggggcccatttttgagatgcaccaga

SEQ ID NO: 1679 - DNA, 108 bp, homo sapiens
gagtcctgcctcctggggcctgatttccctggagttgtgattaggtgggttggagtcctgcttattggagtcctgcttcctggggcctgatttccctggagttgtgat

SEQ ID NO: 1680 - DNA, 74 bp, homo sapiens
tattattaagtcatttgggtaatcccaatataatgggatataatgacttatattattagtcatttgggtaatcc

SEQ ID NO: 1681 - DNA, 114 bp, homo sapiens
tcaccccctatctcggccaaacataagataaaaaagcattgatgataatagaaaataaatattgctgttgcccatcttaattcaccccctatctctgccaaacataagataaaa

SEQ ID NO: 1682 - DNA, 84 bp, homo sapiens
tttacaaaacaaatgaccacttgttttgtgttcacacttagagatttgacagtattttacaaaacaaatgaccatttgttttgt

SEQ ID NO: 1683 - DNA, 82 bp, homo sapiens
gaatatttaatgggcagtgtttttacttgcacaggtaaataatattcttgttcatgagaatatttaatggccagtgttttta

SEQ ID NO: 1684 - DNA, 91 bp, homo sapiens
ggggttcttgcccctcccccagaaaagcagagaaggggtagagacacggagagaaggggttggggtacttgcccctcccccagaaaagcag

SEQ ID NO: 1685 - DNA, 82 bp, homo sapiens
tattcaccaaaaacctgtgccaggattttattcagaacaccttcaaacatcttaaaaactattcaccaaaaacctgtgccag

SEQ ID NO: 1686 - DNA, 85 bp, homo sapiens
aaaatactttcacagcattaagaatatgtgtccactgagttaaatgttaatctcatcttaaaatactttcacagcattaagaata

SEQ ID NO: 1687 - DNA, 104 bp, homo sapiens
taggtcgggtaggcaagtaggtgggtttataggtcctctattgggtgcagtttaagccacaagattgtaggtaggtgaataggtcgggtaggcaagtaggtagg

SEQ ID NO: 1688 - DNA, 125 bp, homo sapiens
ataaatgtccatgaaatcttcacaatttatgttcagagattgcagtaaagacaggcataagaaatcataaaagtattaatttggggaactaataaatgtccatgaaatcttcacaatttatgttc

SEQ ID NO: 1689 - DNA, 99 bp, homo sapiens
aggcctatacggttgaaaaggcatattgtaaaagaacatttaatgacagagcaagttagtaaatgaaaaatataggcctataaggttgaaaaggcatat

SEQ ID NO: 1690 - DNA, 82 bp, homo sapiens
ctaatttttaagattttttgtagagacggccataaataaaatagccataatcctggctaatttttaaaattttttgtagaga

SEQ ID NO: 1691 - DNA, 98 bp, homo sapiens
ctcctggtaccaatttactgtattagtccgttttcacactgctgataaagacaacaataccccactcctggtaccaatttactgtattagtccatttt

SEQ ID NO: 1692 - DNA, 105 bp, homo sapiens
tggggctgggattcaggcacaggcaggctggtacttaatctctctcctacaaataccagcttccttggtgagtattggggctggggttcaggcacaggcaggctg

SEQ ID NO: 1693 - DNA, 86 bp, homo sapiens
ttgggaggctggagggggcactgtggggggttcccctgaggaaagagggcaggagggcttgggaggctggaggtggcactgtgggg

SEQ ID NO: 1694 - DNA, 77 bp, homo sapiens
agagggagaccgtgcagagggagagggagagggaggagagggagactgtgcagagggagagggagagggagagggag

SEQ ID NO: 1695 - DNA, 106 bp, homo sapiens
ccttctgtggtcattcctcaccacccccacccatgctggatgtttgagaattccagtccagcctcttggtgaagccttctgtggtcattcctcaccactcccaccc

SEQ ID NO: 1696 - DNA, 93 bp, homo sapiens
atcaaagctgaaccatttaaaatttctttttttttttccttaaaatcatgagatagagtatcaaagctgaaccatttaaaatctctttttttt

SEQ ID NO: 1697 - DNA, 88 bp, homo sapiens
tttattttattttatttcaatagttttgagggaacaggtggtttttggttacatgaataagttctttatttgtatttcaatagttttg

SEQ ID NO: 1698 - DNA, 105 bp, homo sapiens
tgaattgatcaacaaaaaactataataactgcttatttgggaaaaagagatgagaaaaaaagaaactcttactgattaatgaattgaccaacaaaaaactataat

SEQ ID NO: 1699 - DNA, 134 bp, homo sapiens
atggcattaacttaaatgaaacactgactcaaattactcaaattccaatcactggctcttgatggtttatgtaagttactgtaataaaaacacatggatggcattaacttaaatgaaacacagactcaaattac

SEQ ID NO: 1700 - DNA, 108 bp, homo sapiens
caccaatcggcactctgtatctagctcaaggtttgtaaacacaccagtcagcaccctgtgtttagctcaaggtttgtgagtgcaccaatcgacactctgtatctagct

SEQ ID NO: 1701 - DNA, 356 bp, homo sapiens
caccaatcggcactctgtatctagctcaaggtttgtaaacacaccaatcagcaccctgtgtttagctcaaggtttgtgaatgcaccaatcgacactctgtatctagctgctctggtggggccttggagaacctctgcatctagctcaaggtttgtaaacacaccaatcagcaccctgtgtttagctcaaggtttgtgagtgcaccaatcgacactctgtatctagctgctctggtggggccttggagaatctgtgtgtcgaaactctgtatctaactgggtatttaaagactttttcaatatcttgattttataagcagtactgcggataataggatatttaaagactttttcaat

SEQ ID NO: 1702 - DNA, 79 bp, homo sapiens
gggtatttaaagactttttcaatatcttgattttataagcagtactgcggataataggatatttaaagactttttcaat

SEQ ID NO: 1703 - DNA, 74 bp, homo sapiens
atcctaatgttcaatatgttttgaacattataaacatcatgtcctatgaatatcctaatgttcagtatgttttg

SEQ ID NO: 1704 - DNA, 73 bp, homo sapiens
agattagctagatacagagtgtctgcacaaaggttctccaagtccccaccagagtagctagatacagagtgtc

SEQ ID NO: 1705 - DNA, 91 bp, homo sapiens
ttaagtgggagatattacaatatcagttttaagaaatggtaggaaatcagaggccgagagagattgccttaagtaggagatattacaatat

SEQ ID NO: 1706 - DNA, 129 bp, homo sapiens
agtccttttccgccacaagccacaaagataatcttcaagttctgcaacatattccacagattttgccgtccacatttgacttaagaagtccttttccaccacaagccacaaagataatcttcaagttct

SEQ ID NO: 1707 - DNA, 72 bp, homo sapiens
acaaattatatttaaatacaattatatttaaatacaaattatatttaaatacaattatatttaaatacaaat

SEQ ID NO: 1708 - DNA, 122 bp, homo sapiens
caagtcaataaatgtgatataccacataaaccaaataaaaaacaaaaatccctggtttcatacctgggatgcagggatgatttaacattcacaagtcaataaatgtgatacaccacataaac

SEQ ID NO: 1709 - DNA, 94 bp, homo sapiens
tggtgcatttacaatcctctagctagactcagagcactgactggtacgttttaacagagtgctgactggtgcatttacaatcctttagctagac

SEQ ID NO: 1710 - DNA, 95 bp, homo sapiens
gtgtattaaattttatgtattatatcatcttagcaatcaaccgctagaaattagctggctttgagtggtgtattaaattttgtgtattatatcat

SEQ ID NO: 1711 - DNA, 103 bp, homo sapiens
gctaatttttgtgtttttagtagagacagggtttcaccatgttggccaggctggtcttgatgcccagctaatttttgtatttttagtagagacagggtttcac

SEQ ID NO: 1712 - DNA, 75 bp, homo sapiens
aatgtcatcagttaaggcaagaacaggccattttcacttcttttgtggtggaatgtcatcagttaaggcaggaac

SEQ ID NO: 1713 - DNA, 91 bp, homo sapiens
ggctgggtggttgggaagatggctcagtggctaacctacaacagcctcattcattctcctagtgttggctgggtggttgggaagatggctc

SEQ ID NO: 1714 - DNA, 91 bp, homo sapiens
aaccatccttgtggcatggaggaaatttcttttctttctttattgttattattattaaaaccatccttgtggcatggaggaaatttctttt

SEQ ID NO: 1715 - DNA, 75 bp, homo sapiens
gtgagaatatcttgcataccaggaagattgtagaaaaacttaaaaaataaatgtgagaatatcttgcatgccagg

SEQ ID NO: 1716 - DNA, 81 bp, homo sapiens
gaatgagcctactaacagattgtttttctagggaaaaacagatttcattgtagggaatgagctactaacagattgtttttc

SEQ ID NO: 1717 - DNA, 119 bp, homo sapiens
gcactttgggaggccaaggcgggtggatcacgaagtcaagggttcgggaccagggcctggcgcagtggctcacgcctgtaatccccgcactttgggaggccgaggcgggtggatcacga

SEQ ID NO: 1718 - DNA, 117 bp, homo sapiens
aaaaaaaaagatgaaatgttaaatatatataaaaagaatgtaggccaggcacggtggctcatgaccctgtctcaaaaaaaaaaaaaaaaaaagatgaaatgttaaacatatataaaa

SEQ ID NO: 1719 - DNA, 117 bp, homo sapiens
aagtccatttttataggagatgccctctctgtttctttcttgttttctttgggtggtcccatgtccttggaaggggctaagtccatttttataggagatgccctctctgtttctttc

SEQ ID NO: 1720 - DNA, 80 bp, homo sapiens
aacctatgcatacatttaaaacatgtagcataggttctcataatgtatgcataagcaacctatgcatacatttaaacatc

SEQ ID NO: 1721 - DNA, 162 bp, homo sapiens
gctccaatctgcagctagtcatcctgatgcctgcccagctcctagccaagaggaggcactggagtgggttgctcctctctgcagctggtaatcctgatgtctctacaggtctctgaaattctcagcaaagagggtagctcctctctgcagctggtcatcctg

SEQ ID NO: 1722 - DNA, 98 bp, homo sapiens
ttattcttgtatttgtcaggtccttctatatcatcatttttaccatttttttaataatttctttagaatttattattcttgtatttgtcagggccttc

SEQ ID NO: 1723 - DNA, 75 bp, homo sapiens
tgtctctactaaaaatacaaaaattaccatcctggctaacacggtgaaaccccgtctctactaaaaatacaaaaa

SEQ ID NO: 1724 - DNA, 76 bp, homo sapiens
ccccaccagattagctagatacagagtgtggacacaaaggttctccaagtcccccaccagagtagctagatacaga

SEQ ID NO: 1725 - DNA, 83 bp, homo sapiens
gagcttgcagtgggccgagatcgtgccactgcactccatcctgagcgacagagtgaggcagagcttgcagtgggccgagatcg

SEQ ID NO: 1726 - DNA, 80 bp, homo sapiens
attaagactacatttagctttgtaagaatgccgtgggtgtggtggctatgccgggattaagactacgtttagctttgtaa

SEQ ID NO: 1727 - DNA, 106 bp, homo sapiens
atttatccactgattgagacttttttttttgagatggagtctcactggttcgcccaggctgtagcgcaggggtgcgatttatccactgattgagactttttttttt

SEQ ID NO: 1728 - DNA, 106 bp, homo sapiens; identical to SEQ ID NO: 1727

SEQ ID NO: 1729 - DNA, 76 bp, homo sapiens
agtctctaggaagttccaaactttcccacatctttctgtcttctgagccctcagtctctaggaagttccagacttt

SEQ ID NO: 1730 - DNA, 91 bp, homo sapiens
agtaaactaagaatgttattcattgccatttgccctcattctcaattatttaacaatttcgagtaaactaagaatgttattcattgccatt

SEQ ID NO: 1731 - DNA, 83 bp, homo sapiens
gagatcaatgcaacaagaagcactaagagacaaataactgcattacataatggtaaggagatcaatgcaacaagaagcactaa

SEQ ID NO: 1732 - DNA, 82 bp, homo sapiens
gtctctactaaaaatacaaaaattagctgggtgtggtggcaggtgcctgtatttttagtctccactaaaaatacaaaaatta

SEQ ID NO: 1733 - DNA, 110 bp, homo sapiens
caactattccgatcagcagggtccagggaccgttgctggttcttgggcaagagggagatctgctgctgcgtcagtgagcacaactattctgatcagcagggtccagggac

SEQ ID NO: 1734 - DNA, 109 bp, homo sapiens
tttctgctgctgcatcagtgagcgcaactcttccaatcagcagggtccaggaaccgttgcaggttcttgggcaagaggtatttctgctgctgcatcagtgagtgcaact

SEQ ID NO: 1735 - DNA, 109 bp, homo sapiens
gaaagaaagaagagagagagagagagagagagagagagaaaggaaggaaggagggagggagggaggaaggagggagggacggagggagggagggagagagggaaggagg

SEQ ID NO: 1736 - DNA, 141 bp, homo sapiens
cccttggaataactagaatcaggtgactctcttctttgggacagttgcatgtgtgtaagtgtgacagtgtgtgtgtgtatcagtgcttacacagccctcggaataactagaatcaggtgactctcttctttgggacagttg

SEQ ID NO: 1737 - DNA, 90 bp, homo sapiens
tgtaggtggggcttggagaagtgtaatagcctaagattgtgtagctgctaatgtcagattttgtaggtgaggcttggagaagtgtaatag

SEQ ID NO: 1738 - DNA, 90 bp, homo sapiens
actccagcctgggtgacagagcaagactccatctcaaaaaaaaaaaaaaaagaaaaaggtcttactccagcctgggtgacacagcaagac

SEQ ID NO: 1739 - DNA, 75 bp, homo sapiens
cagaattctatagctaacaaaaatacctttcagaggccaggcacagaacccagaattctatggctaacaaaaata

SEQ ID NO: 1740 - DNA, 101 bp, homo sapiens
ttgggtggtggtgatttgctttttcacaaaccactttatagtagtcccttctaaggatcacacggatttgggtggtggtgatttgcttttccacaaaccac

SEQ ID NO: 1741 - DNA, 124 bp, homo sapiens
ccagagcatttcatatttctaaaagtgtgtccactttctttgagctctaaatttctttcttctccttgttcaattctgttgctgagacttaccagagcatttcacatttctaaaagtgtgtcca

SEQ ID NO: 1742 - DNA, 129 bp, homo sapiens
gttcaaggacagacaaaaataatctatggtaataaaagaattgtggttcccttgtgggggtgaagatgtactgtatgatcccatttacatgacgttcaaggacagacaaaaataatctatggtagtaaa

SEQ ID NO: 1743 - DNA, 143 bp, homo sapiens
atatgctaaacattagcaacctttacttattatcttgtttataaaactacattttgaccatgagattttttttatggcctaaaaagttttttttaatatgctaaacattagcaacctttacttatgatcttgtttataaaact

SEQ ID NO: 1744 - DNA, 91 bp, homo sapiens
tctcagcagagaggaggccctggggatggtagctcctctctgcaactggttgtcccaatgtctacagctctcagcagagaggaggccctgg

SEQ ID NO: 1745 - DNA, 96 bp, homo sapiens
cccggctaatttttgtatttttagtagagacagggtttcaccatgtttagtagagataatgaaaccccgtctaatttttgtatttttagtagagac

SEQ ID NO: 1746 - DNA, 108 bp, homo sapiens
actccgccattttgcctcttagtgacttgaggcatttttcccttaccagtcaagtgttcctaaggaaggtcacataccagttaaactctgccattttgcctcttagtg

SEQ ID NO: 1747 - DNA, 100 bp, homo sapiens
aactacaaaccactcaagcatatcagaaaaggggaagatgagtaaatagaaaatgcttgtttttggaggcattaatcaactacaaaccacccaagcatat

SEQ ID NO: 1748 - DNA, 96 bp, homo sapiens
tatacacattataaaataaactatatacagtatatattgtgtgtatgtagatataacatatagatatattatgtatatacattataaaataaacta

SEQ ID NO: 1749 - DNA, 123 bp, homo sapiens
aaatgtctatgaaatcttcacaatttatgttcagagattgcagtaaagacaggcataagaaattataaaagtattaatttggagaactaacaaatgtctatgaaatcttcacaatttatgttc

SEQ ID NO: 1750 - DNA, 248 bp, homo sapiens
gcaccaatcagcgctctgtgtctagctaaaggtttgtaaatacaccagccagccctctgtgtctagctaatcaggtggggacttggagaacttttctgttagctaaaggattgtaaatgcaccaatcagtgctctgtgtctggctaaaggtttgtaaacacaccaatcggcactctgtaaaaacgcaccaatcagcgctctgtgtctagctaaacgtttgtaaatgcaccaatcagcactctttaaaa

SEQ ID NO: 1751 - DNA, 123 bp, homo sapiens; identical to SEQ ID NO: 1749

SEQ ID NO: 1752 - DNA, 114 bp, homo sapiens
aggcaggagaatcacttgaacctgagaggcagaggtcacagtgagcagagatcacgcctgtaatcccagctactagggaggctaaggcaggagaatcacttgaacctgggaggc

SEQ ID NO: 1753 - DNA, 75 bp, homo sapiens
tatagatggtagagtagagagacagaattcaggtccttgagtagagtagagtatagatggtagagtagagagaca

SEQ ID NO: 1754 - DNA, 95 bp, homo sapiens
atgcactttagaatcagctgcgaatcattccacaatgctgtgttattagaatcagtggttttcaatcttagatgcactttagaatcagctgggaa

SEQ ID NO: 1755 - DNA, 84 bp, homo sapiens
ataagtgaaatcatacaatatttattgtgcctcatatgaggtacaatataaatgtcctcatataagtggaatcatacaatattt

SEQ ID NO: 1756 - DNA, 97 bp, homo sapiens
ttatacctgccacttattcctgacaccatctaaaatcctgagtttatgaaccaagtgagtccatatatggaaagttatacctgccacttatttctga

SEQ ID NO: 1757 - DNA, 103 bp, homo sapiens
cttttcataacactctatgaattatgaaatgtttactaaatgccaggcactcttataagtacttgtgttatcctgattgcttttcataacactctatgaatta

SEQ ID NO: 1758 - DNA, 89 bp, homo sapiens
gtatacatctgtgccttatatatacatacatacatacacacacacacacacacacacacacacgtatacatctgtgccttatatacaca

SEQ ID NO: 1759 - DNA, 99 bp, homo sapiens
ttttagagcctgcctaaaaaaaaatgttttttttttgttttgttttgttttgttttattttgttttgtttttagagcctgcctaaaaaaaaaagttttt

SEQ ID NO: 1760 - DNA, 145 bp, homo sapiens
gaactcttgatttagatggagggaaattatttgtggtttaggtagtaaacctacccaaggcaagaatacccaagggttaatgttgtggcagaaggttagaactcttgatttagatggagggaaattatttgtggtttaggtagta

SEQ ID NO: 1761 - DNA, 131 bp, homo sapiens
agatttgttctgactgagggaagcaaggaagggctccctcaatttttttgaaggagggagcatacaataagaatcccaggaatgcagagaagtaagatttgttctgactgagggaagcagggaagggctcc

SEQ ID NO: 1762 - DNA, 95 bp, homo sapiens
tacaggaagcatggctcaaggagatttagaggcttaattggctcatggttctgcaggaagcacagttgtacaggaagcatggctcaaggagattt

SEQ ID NO: 1763 - DNA, 108 bp, homo sapiens
caattaactaaagacatcgctagctaatagtgaggcttcccacctataatctaagcataatatgttaatttagctaatgcaattaactaaagacatcgctagctaata

SEQ ID NO: 1764 - DNA, 104 bp, homo sapiens
tggcttaaaacaattgatcttgtatgggcgagagagtgagacaatgtctcaaaaaaaaaaattaccccaatatttagtggctcaaaacaattgatcttgtatgg

SEQ ID NO: 1765 - DNA, 82 bp, homo sapiens
attaactttttaaagagattaaatttttaaagtaatttaaagtaaagtaatttaaagtaattaactttttaaagtgattaaa

SEQ ID NO: 1766 - DNA, 109 bp, homo sapiens
gatgtgctttggtaagaaatggctgagtacgtgcttaccaaagcacagtggatgagaaatgtgcttaccaaagcacagtggatgtgctttggtaagaaatggctgagta

SEQ ID NO: 1767 - DNA, 73 bp, homo sapiens
atctgatattcatatgtctgtgggtacatttaatatgcttcaccccaaatatctgatattcatatgtctttgg

SEQ ID NO: 1768 - DNA, 88 bp, homo sapiens
ataaataaaatttatttcccaaataaatttcaggtgtgctaaagatttagcacacctaggataaataaaatttagttcccaaataaat

SEQ ID NO: 1769 - DNA, 120 bp, homo sapiens
gtacatagaaatatgtgttttaaatagaaagattattttaaatggtatatagaaagatgtgtttaaaatacaaataactgttgtattatttgtaatagtacatagaaagatgtgtttaaa

SEQ ID NO: 1770 - DNA, 84 bp, homo sapiens
attcaggatagggctatgagtttcagataatggcaagtgttagtgcacaccatatgtattcaggagagggctatgagtttcaga

SEQ ID NO: 1771 - DNA, 90 bp, homo sapiens
ttacaatttgatatgtttttgcagtggctggtaccagtttttcctttccatatttagtgcgatgatcttacaatttggtatgtttttgca

SEQ ID NO: 1772 - DNA, 103 bp, homo sapiens
ttttatttggaaacaatgtcaaataagagtagtaaagaccattcctttaaaaatgtttttgattttaaaacttttatttggaaataatgtcaaataagagtag

SEQ ID NO: 1773 - DNA, 96 bp, homo sapiens
catttactgtgtgtgctttggtaggtgatggtctcattatgcatttccttctcagtgtcaggacacaaatgccatttaatgtgtgtgctttggtag

SEQ ID NO: 1774 - DNA, 123 bp, homo sapiens
tgataaatgtccatgaaatcttcacaatttatattcagagattgcagtaaagacaggcataagaaattataaaagtgttaattttgggaactgataaatgtccatgaaatattcacaatttat

SEQ ID NO: 1775 - DNA, 122 bp, homo sapiens
aaattggtctatatagcaccattttttttctatacttattaagtctacttaacctacatgtacttcaacaatgacaacaaaaaaagtcataaattggtctatatagcaccattattttttct

SEQ ID NO: 1776 - DNA, 86 bp, homo sapiens
cccccatctctaaaataaataaatcaataaataaaaataaccaggctgggcaacatagtgagacccccatctctaaaataaataaa

SEQ ID NO: 1777 - DNA, 79 bp, homo sapiens
agcagagaggatagctcctctctgctgctggttgtccagtcatctccagttatcagcagagaggataactcctctctgc

SEQ ID NO: 1778 - DNA, 118 bp, homo sapiens
cctctgacttaactaattagttaatttggagcagagtttgaacacagtcctttttctaaacagaggaattgttgaatatgcaactggtcctctgacttaactaattatttaatttgga

SEQ ID NO: 1779 - DNA, 118 bp, homo sapiens; identical to SEQ ID NO: 1778

SEQ ID NO: 1780 - DNA, 102 bp, homo sapiens
cagagccatcttccctagcttgttgaatgcacacatactgtatgttgtatatacacacatctgtacaacatatagcagagccatctttcctagcttgttgaa

SEQ ID NO: 1781 - DNA, 189 bp, homo sapiens
atctggcacaaagcaatcacttaatagtatctgagtgactatctggcacaaagccagatctggcacaaagcaatcactcaataaagtgaggaggcttctgcccggccgccccacagtctgggaagtgaggagcgcctctgcccagcttccgcaccgcctggcaagtgaggagcgcttctgcccggccgc

SEQ ID NO: 1782 - DNA, 106 bp, homo sapiens
aagtgaggaggcttctgcccggccgccccacagtctgggaagtgaggagcgcctctgcccagcttccgcaccgcctggcaagtgaggagcgcttctgcccggccgc

SEQ ID NO: 1783 - DNA, 129 bp, homo sapiens
attgagtcagtgacaaccagaagtactgggaatctttcacaaagaattcaggaatgggaccccctaatcttttcctgcagatataaagctattgagtcagtgacaaccagaagcactgggaatctttca

SEQ ID NO: 1784 - DNA, 108 bp, homo sapiens
aatacagagtctcactctgtcacccattctgttaactggctttactggttcattgtttcttttttttttttttttttttttaaatacagagtctcactctgtcgccca

SEQ ID NO: 1785 - DNA, 119 bp, homo sapiens
tagtggcccttaccaacgcattcttgaaaacctgcacccttgcctgtcctcctagaccacaaagaggactgagaaaaattggatttagtggcccttaccaatgcattcttgaaaacctg

SEQ ID NO: 1786 - DNA, 122 bp, homo sapiens
tcttggctcactataacctccacccccggggttcaagtgattctcctgtctcagcctccggagtagctgggactacattcgtgtgccaccatcttggctcactataacctccacctccgggg

SEQ ID NO: 1787 - DNA, 150 bp, homo sapiens
ttgggcacctgcagctgcacaggggcccaggtctgcagccgtggtttgggtggctgcagctgcacccagcagggcagggctcctgcctgctccgtggatccaggggccatgatccactgccacaacttgggtggctgcagctgcacccag

SEQ ID NO: 1788 - DNA, 76 bp, homo sapiens
tatttctggaactaactgtgtccagtagctcccagtttattgcaaggaaagtatttctggaattaactgtgtccag

SEQ ID NO: 1789 - DNA, 65 bp, homo sapiens
gcaccaatcagccctctgtgtctagctaaaggtttgtaaacacacctatcagcactctgtaaaaa

SEQ ID NO: 1790 - DNA, 113 bp, homo sapiens
gcaagaggggctggctctttcttactcccggcatctcggggggcgcctcgccccactgtgatgtgggtcctacgagccaggggagcaagaggggctggctatttcttactccc

SEQ ID NO: 1791 - DNA, 73 bp, homo sapiens
gcgccatgtgctctgggggctgtggcagggcaggggcagcttggaacctgcgccatgtgctctgagggctgtg

SEQ ID NO: 1792 - DNA, 75 bp, homo sapiens
tcccagcactttgggaagctgaggcaggcggatcacctgaggtcaggagttcccagcactttgggaagctgaggc

SEQ ID NO: 1793 - DNA, 141 bp, homo sapiens
gacccttatcagtggttctgcttttgacctttgctttgtgatcattgctggacccttatcagtagttctgcttttaccctttgccctgttccctcagaagcatgtgatctttgttagacccttagtagtaattctgctctt

SEQ ID NO: 1794 - DNA, 104 bp, homo sapiens
gcctcacccccctgcgatggggatcatgagagacggggggggaggggggctggctttcactccctgcatcgcggggggtgcctcacccccctgcgatgggggtc

SEQ ID NO: 1795 - DNA, 104 bp, homo sapiens
ggggggaagaggggttggctcttactccccgcatcatggggggttcctcacccccctgcgatgggggtcctaagagccaggggggaagaggggctggctcttac

SEQ ID NO: 1796 - DNA, 159 bp, homo sapiens
tatactgatttcagttcctttgggtatatacccagcagggggattgtggagtcatacactagctctatactgcaataaacacgggaatacagatatatctttcatatactgatttcagttcctttgggtatgtacccagcagggggattgtggagtcat

SEQ ID NO: 1797 - DNA, 96 bp, homo sapiens
ttgtagctcccgtaactcccgtgtgttgtgggagggacccggtgggaggtaattgaatcatggttgtagctcccgtaactcccatgtgttgtggga

SEQ ID NO: 1798 - DNA, 154 bp, homo sapiens
tgctcctcaatggaaattttaaggatacaatattgtttccagtcatctgtctttcagcaatatcacccagtgactcgatgcaatcaaatgtgtatatgtagacattgtgctcctcaatggaaattttaaggatacaatattgtttccagtcatc

SEQ ID NO: 1799 - DNA, 146 bp, homo sapiens
atttcccttatcaagtgctctgggtccaacgtgcatatagacactcacatgtgttaaaagttcagagtgcctccttcaccactgcttgagtgatttcccttatcaagtgctctgggtccaacgtgcatatagacactcccatgtgt

SEQ ID NO: 1800 - DNA, 73 bp, homo sapiens
tgatttctttcagcagtgttttgaaatcctcactgtagggatcttttcactgatttctttcaccagtgttttg

SEQ ID NO: 1801 - DNA, 63 bp, homo sapiens
tattatgttgcataatgcatatattacatacatatatgtatattacattgcataatgcatata

SEQ ID NO: 1802 - DNA, 82 bp, homo sapiens
ccatcaatccttctatttaagaaacgttcgacgagtaggagatcaagtatcatccctccatcaatccttttatttaagaaac

SEQ ID NO: 1803 - DNA, 167 bp, homo sapiens
ttctcctgtggtccagtgagcaggagcacgttcagctctttcattctcactgcgcgtcctgtgtggtccagtgagcaggagcatgtcacagctctctttctcctgtggtccagcgagcaggagcatgtcacagctctctttctcctgtggtccagcgagcaggagca

SEQ ID NO: 1804 - DNA, 100 bp, homo sapiens
ctactcttgttgttaaatatccagctcacacagatccaaaagcatggtctcattctagcgaggctgatacagctactcttgttgttaaatatccaactca

SEQ ID NO: 1805 - DNA, 155 bp, homo sapiens
cagtcggcactctgtatctagctcaaggtttgtaaacacaccagtcagcaccctgtgtctagctcagggtttgtgaatgcaccagtcgacactctgtatctagctactcgggtggggccttggagaacctctgtgtcgacactctgtatctagct

SEQ ID NO: 1806 - DNA, 96 bp, homo sapiens
attctaacatcagagatcctatccaaaagaataacagaagtgctaattaattattaaacataaatcctatcctattctaacatcagaaatcctatc

SEQ ID NO: 1807 - DNA, 109 bp, homo sapiens
atggatggaatgtaataataagaatattaaccctaagagtcatttcatctcagtcaagcctcagtttgtcatcatctgtacaatggacggaatgtaataataagaatat

SEQ ID NO: 1808 - DNA, 90 bp, homo sapiens
ttttggtaatatttattggctataaattaaattctatagtgaaaatgacatactggattataagtttttggtaagtatttattggctata

SEQ ID NO: 1809 - DNA, 108 bp, homo sapiens
aaataaagagtcttatttggaaaattcactctatgatttcagtgcaatcccaattataatcatggacattaaaaaatagaaataaagagtcttatgtggaaaattcac

SEQ ID NO: 1810 - DNA, 107 bp, homo sapiens
gctactgaactatactcatgtgattttgaaggaattaagagcctattaacaaagaattatgttgaaatgctactgaaccatactcatgtgattttgaaggaattaag

SEQ ID NO: 1811 - DNA, 97 bp, homo sapiens
tagatcaatttgaacaattaaacaatgaaaatacaaaatgaactgatatagtctctcactagccaactgtagatcaatttgaacaattaaataatga

SEQ ID NO: 1812 - DNA, 84 bp, homo sapiens
ttctcaccaaaataattatttcacacaaatatactttaaaaatatattattaaaatgtgcttctcaccaaaataattatttcct

SEQ ID NO: 1813 - DNA, 100 bp, homo sapiens
accaatcagaggctgaaatgaagttacaaaggttacaccctatgcaagcatgtgataggttgtggaaagcaaccaatcagaggctgaagtgaagttacaa

SEQ ID NO: 1814 - DNA, 100 bp, homo sapiens; identical to SEQ ID NO: 1813

SEQ ID NO: 1815 - DNA, 87 bp, homo sapiens
gataagaaacaaattatctaagttatagagaaagttatagggatatccttacaaataatgataagaaacaaatgatctaagttatag

SEQ ID NO: 1816 - DNA, 81 bp, homo sapiens
gatattgtctaaagagttttgtttttggaaagatttcgtgaaactgaatttgacttggatattgtctaaagagttttgttt

SEQ ID NO: 1817 - DNA, 124 bp, homo sapiens
ttttattctcaaaactatattttaaatatttaagttgaataaagtaattttactgtatatacaagtgttcactgtacatagaagtgatactttttattctcaaaaatatattttaaatatttaa

SEQ ID NO: 1818 - DNA, 80 bp, homo sapiens
caaactttcccacatcttcctgtcttctgagccccccaagtctctaggaagttccaaactttcccacattttcctgtctt

SEQ ID NO: 1819 - DNA, 113 bp, homo sapiens
ttttacagagcgctgattggtccattttacagagtgctcattggtctgtttttacagcatgctgattggtgcatttacaaacctttagctaggcacagagtgctgattggtgc

SEQ ID NO: 1820 - DNA, 79 bp, homo sapiens
taggaagttccaaactttctcacatcttcctgtcttctgagcccttcaaacctctaggaagttccaaactttcccacat

SEQ ID NO: 1821 - DNA, 91 bp, homo sapiens
tttaattaaagttgtatttaaattcaacttttaaaacttatgttaattcaattatttaaattcaatattttaattcaagttgtatttaaat

SEQ ID NO: 1822 - DNA, 99 bp, homo sapiens
atctataaaagcatgagatacaatctatctataaatacataaataaatttataaatctataaatgcttttatacaatctataaaagcatgagataaatt

SEQ ID NO: 1823 - DNA, 114 bp, homo sapiens
tgtttccttaaagtcttagtttgattatgttttaagatctatgtgtttccttaaagtcttagtttgattatattttaagatctatgtgtttccttaaagtcttagtttgattat

SEQ ID NO: 1824 - DNA, 122 bp, homo sapiens
aaatgtccatgaaatcttcacaatttatgttcagaaattgcagtaaagactagtgtaagaaattataaaaatattaattggggaactaacaaatgtccatgaaaacttcacaatttatgttc

SEQ ID NO: 1825 - DNA, 93 bp, homo sapiens
cataaaaaggtgccaacctacaaaatggtaaccctgttaatataaccctatgaatataacataaaaagatgccaacctacaaaatggtaaccc

SEQ ID NO: 1826 - DNA, 94 bp, homo sapiens
tattgcaatctctatctcactgcagagtctttacatttttttggtcattaaagtcccatagtatgattctattgcaatctctctctcactgcag

SEQ ID NO: 1827 - DNA, 120 bp, homo sapiens
ctctatgcttgagcccactcccaccctgtggagggtactttcactttcaataatttaaaccccagaaaattctgtaactcagctctatgcttgagcccactcccaccctgtggagcgtac

SEQ ID NO: 1828 - DNA, 85 bp, homo sapiens
tgaatttctccatcaaactctagctgtatatatgtatacacataaatatgttaaactatcttgaatttctccatcaaactctagc

SEQ ID NO: 1829 - DNA, 101 bp, homo sapiens
tttgctaagacacctaaagataagcaaggatttgaagctatttcaaaatcctgtttatttttctcaatttgctaagacacctaaagatgagcaaggatttg

SEQ ID NO: 1830 - DNA, 156 bp, homo sapiens
ggatttctgtattgataaatgttactgagcatggaaggaagaaaagaagcgagggagggagggagggagggaggaaggaaggaaggaaagaaggaaggaaggaaggaaggatttctgtattgataaatgttactgagcatggaaggaagaaaagaa

SEQ ID NO: 1831 - DNA, 90 bp, homo sapiens
atacccatatagaaaatttggaagctagtattgtttgtttctgattactatttttaaaaactaatacccatatagaaaatttggaagcta

SEQ ID NO: 1832 - DNA, 92 bp, homo sapiens
ccactccagggcctcctctctgctgagagctggggagacaggacaacctccctgcagagagaagcttcccactccagggcctcctctctgct

SEQ ID NO: 1833 - DNA, 80 bp, homo sapiens
ggaatggcagggagggatatctagcatatagatatgcgtgtgcatacatttggtggggaaaggcagggagggatatctag

SEQ ID NO: 1834 - DNA, 77 bp, homo sapiens
agtaagggcttaataaatagtaagggcttaataagagtaattaatggacattcagtaagggcttaataaatagtaag

SEQ ID NO: 1835 - DNA, 112 bp, homo sapiens
aataaaatcctgtacccattaagcagttcacaatggtgtgttaccaccacctgtatctagttctaaaacattttcatcaccttagaataaaatcctgtaaccattaagcagt

SEQ ID NO: 1836 - DNA, 104 bp, homo sapiens
tcaaacatacctctcctttctctaaatttcccacaaaattcaggattagtatccccaggaagtatctcctttacttcaaacatacctctcttttctctaaattt

SEQ ID NO: 1837 - DNA, 78 bp, homo sapiens
tctctagaaagttccaaactttcccacatcttcctgtcttctgagccctccacatctctaggaagttccaaactttcc

SEQ ID NO: 1838 - DNA, 113 bp, homo sapiens
tatgattaatggttctaacctagttgtggtaaatataccaaatataacctagttgtggtaaatatgaggtaactataccaaatatggttaatggttctaacctagttgtggta

SEQ ID NO: 1839 - DNA, 78 bp, homo sapiens
aggaagttccaaactttcccacatcttcctgtcttctgagctcgtctagtctccaggaagttccaaactttcccacat

SEQ ID NO: 1840 - DNA, 92 bp, homo sapiens
accaatagactgtgtgtatctatctatccattgagagagagatagagagggggcagggaaagaatacaccaatagactgtgtgtatttatct

SEQ ID NO: 1841 - DNA, 82 bp, homo sapiens
ttcagtattactgaaagtatactgacatgatcctttcagtataagtatacttatataccttcagtaatactgaaagtatact

SEQ ID NO: 1842 - DNA, 229 bp, homo sapiens
cagagaggagctaccctccctgctgagagcttcagagacctgcagagatgtcaggactaccagctacagagaagagcaacccactccagggcctcctctctgctagaagctgggaagacattggaatgatcagcagcagagaggagccaccctctccagggcttcctctctgctgagagctgcaaacatctggacaacctgcctacagagaggagccaccctctccagg

SEQ ID NO: 1843 - DNA, 77 bp, homo sapiens
gtttggaacttcctatagacttggagggttcagaagacaggaagatgtggaaaagtttggaacttcctagagacttg

SEQ ID NO: 1844 - DNA, 90 bp, homo sapiens
agattatagaacttttgatataattggtctataattgatataataagaactaggatatataagatatatagaacttttgatataattggt

SEQ ID NO: 1845 - DNA, 91 bp, homo sapiens
gatattctaattatttaagtattattaaataattaaatatatttttccttttattaaatacaaatcgatattctaattatttaagtattat

SEQ ID NO: 1846 - DNA, 111 bp, homo sapiens
tcctcccagaccacaaggaggaccaaagaaggtcagatttagtggcccttactgatgcattcttgaaaacctgcacccttgcctgtcctcctagaccacaaggaggaccaa

SEQ ID NO: 1847 - DNA, 126 bp, homo sapiens
aagaatgatttcatttatactccataatgtaaattatttactttataaataacttaagtaacacttgttgattatagatccactttatattacaagaatgatttcatttatactccataatgtaaa

SEQ ID NO: 1848 - DNA, 112 bp, homo sapiens
tcccagtaggggcggccgggcagaggcgcccctcacctcccagatggggcggctggctgggcggggggctgaccccccccacctccttcccagatagggcggctggctgggc

SEQ ID NO: 1849 - DNA, 71 bp, homo sapiens
tttttgttttgtctctaatttttatttctaatttttcaactaggaatatgaaatgtttgtttctaatgttt

SEQ ID NO: 1850 - DNA, 76 bp, homo sapiens
gagaaggtatctcattgagaaatgcaagttttgatttgcattcttagtggcaggagaaggtatctcacttgagaaa

SEQ ID NO: 1851 - DNA, 103 bp, homo sapiens
tcactcattagttatatatatatatatatatatatatatatatatatatatatatatattaatagagcttcactcacaagttatatatatatatatatattat

SEQ ID NO: 1852 - DNA, 124 bp, homo sapiens
catggaatcaacctaaatgcccatcaatgttagactgatgagcatacatgcatgcatatgttcattgcaacactgtttacaatagcaaagacatggaatcaacctaaatgcccatcaatgttag

SEQ ID NO: 1853 - DNA, 88 bp, homo sapiens
tagatatggtgattataatattaaatgttgattataatattaaatgaaatggtgattatagaaatggtgattataatattaaatgttg

SEQ ID NO: 1854 - DNA, 103 bp, homo sapiens
gtatgttgcctaccaggtcaaaaagaaaaagaaatactaaaatactaaatattaatattaaaatactaaagaatagtatgttgcctaccagttcaaaaagaaa

SEQ ID NO: 1855 - DNA, 91 bp, homo sapiens
aaaaattctatctgatgaatatatagagattgagtaaagctggaagatctgaatgatacaatttaaaaattctatcttatgaatatataga

SEQ ID NO: 1856 - DNA, 198 bp, homo sapiens
tcattcagaaatgacttgaataatacgccaggagaggggaaataaaagcttgttctcagagcacaacaggcttggggaagtatcattcagaaatgacttggataataaaaaattctatctgatgaatatatagagattgagtaaagctggaagatctgaatgatacaatttaaaaattctatcttatgaatatataga

SEQ ID NO: 1857 - DNA, 86 bp, homo sapiens
aaaaagaataaaatacttagaaataaattgattaaataaattaaattttgatagcaacaaaaaaataaaatacttagaaataaatt

SEQ ID NO: 1858 - DNA, 109 bp, homo sapiens
aggcgtctcctacttctccaggagttgtgagctttttctgccttatacaaccttcttataaccttccttgattattattatagtaggcgtctcctgcttctccaggagt

SEQ ID NO: 1859 - DNA, 121 bp, homo sapiens
tttggagagacagggttttgtcatgttgtccgggctgatcttcaccacacccagccaatttttttgtttgtttgttttgtttggagagacagggttttgtcttgttgtccgggctgatctt

SEQ ID NO: 1860 - DNA, 259 bp, homo sapiens
ttgtatatgcaccagtcagcactctgtgtctagctcaaggtttgtaaacacaccactcagcaccctgtgtctagctcaaggtttgtaaatgcaccaatcagcactctgtgtctagttaacctggtgaggacttgaagaacttttatgtctagctagaggattgtaaatgcaccaatcagcactctgtgtctagctcagggattgtaaatgtaccaatcagcaccttgtcaaaacggaccaatcagctctctgtaaaacg

SEQ ID NO: 1861 - DNA, 121 bp, homo sapiens; identical to SEQ ID NO: 1859

SEQ ID NO: 1862 - DNA, 332 bp, homo sapiens
agacagacaccccacaatggggctacagacaaaccaggacccctgaaggagcggaaccgagacagacaccccacaagggtcctagagacagacaccccactatggggctacagaaaaactgaaacccctgaaggagccaaaccaactgggagaaggaaagaggtgttggcagcacctaggatatttaccaatccagacaccctgtaatggggctacagctatagatactccatgacatgactgagctacagacagacaccctataatagggctacagttacacacaccccaccatggagctacaggcagacaccctgtgatagagctacagt

SEQ ID NO: 1863 - DNA, 96 bp, homo sapiens
tgcctaaaaataataggcaataatttttaataaattataacttttaataaaaattagttattgcctaaaaataataggcaataattttaataaata

SEQ ID NO: 1864 - DNA, 133 bp, homo sapiens
gagctttttaagttatataatttttattaaatttaataatttctattaaatttaataaatatttaagaacagcatgaaataaagtgagcttttgaagttatgatttttattaaatttaatcatttctattaaa

SEQ ID NO: 1865 - DNA, 94 bp, homo sapiens
tggtggccttggggattgtaacagatgtgtgtgtgtgttagtgtgttagtgtgtggtggtgtgttggtggtggccttggggatcgtaacagatg

SEQ ID NO: 1866 - DNA, 98 bp, homo sapiens
aggccaattcctataataaatttccccatatatatctatattattgtggggattcttggcccccataatcacataaggcaattcctataataaatttc

SEQ ID NO: 1867 - DNA, 93 bp, homo sapiens
ccatgagaacttccccaacctagtcagagaggccaacattccccaacctatcattcatgagttctgtcacccatgagaacttccccagcctag

SEQ ID NO: 1868 - DNA, 96 bp, homo sapiens
aaattcaaaatatatcatttgggatatatttgaatatatcccaatatatattttgaaaaatatatcaaaggaaaattcaaaatatatcatttggga

SEQ ID NO: 1869 - DNA, 87 bp, homo sapiens
aggaattaagcaaatatttacattctgaatataggatttgtcaatacagttgagctgaaaacagaggaattaagcgaatatttacat

SEQ ID NO: 1870 - DNA, 125 bp, homo sapiens
gaacataaattgtgaagatttcatggacatttattagatccccaagttaatacttttataatttcttatgcctgtctttactgtaatgtctgaacataaattgtgaagatttcatggacacttat

SEQ ID NO: 1871 - DNA, 104 bp, homo sapiens
ttatttcatttctttgggaaaatgtttcttcatttttaaagtaaaagtttttaacaagtttataaagttttaagatatttcttcatttttaaaataaaagtttt

SEQ ID NO: 1872 - DNA, 115 bp, homo sapiens
gaatttatcaatttcttctagatttcccaatttattcacatatatttgcttaaattcttacatatatataagaatttatcaatttcttctagatttcccgatttattcacatata

SEQ ID NO: 1873 - DNA, 150 bp, homo sapiens
agactgataattttcactataatcttgctgtgtagaaggttggatgggcctcagtttataaatgtggaaactgaggatcagagatatagttcatcacagactgataattttcactacaatcttgctgtgtagaaggttggatgggcctca

SEQ ID NO: 1874 - DNA, 93 bp, homo sapiens
aataaaacaagctctgcaaatcaaggactaaaaataaaacaagtaaaatatagcccactacgtataaaaaaataaaacaagctctgcaaatca

SEQ ID NO: 1875 - DNA, 85 bp, homo sapiens
aagagtcaatattatcaagacgccattttttctcctattatcaagaagttaggttttgtcaagagtcaatattatcaagatgcca

SEQ ID NO: 1876 - DNA, 93 bp, homo sapiens
tgtctttcaatgacttgttcatttaatataaattgtaaatttattttcttgaggaagcttttacaatttttgtctttcaatgacttgttcatt

SEQ ID NO: 1877 - DNA, 125 bp, homo sapiens
ataaatgtccatgaaatcttcacaatttatgttcagagattgcagtaaagacaggcataagaaattataaaagtattaattttgggaactgataaatgtccatgaaatcttcacaatttttgttc

SEQ ID NO: 1878 - DNA, 99 bp, homo sapiens
aatcaaaatgatcacatgttgtggtaggatagtgagattagaaatcagaaagtgttgaaagattttaggaagcaaaatcaaaatgatcacatgttggga

SEQ ID NO: 1879 - DNA, 152 bp, homo sapiens
cacaaatcagtgctctgtaaaaacgcaccaatcagcactctgtaaaaatgcaccaatcagcgctctgtagctagcaagaggattgtaaaatgcaccaatcagtgctctgtaaaacccaccaatcagcactctgtaaaatgcaccaatcagca

SEQ ID NO: 1880 - DNA, 90 bp, homo sapiens
gggtaggggtgttcttgctaaccaattaggattcctgctgaaggaggcggggggcatcagatatcaagggtaggggtattcttgctaacc

SEQ ID NO: 1881 - DNA, 103 bp, homo sapiens
attgaataaatgcattagtcaaaattagatttcttagtctactgatacatagaactttctcagtacatacatgacaattgaataaaggcattagtcaaaatta

SEQ ID NO: 1882 - DNA, 109 bp, homo sapiens
aatagagaaaagcataattaactggagattttaactgtccaccaaagggtaaagacatataagacaaaaaaggaaatagagaaaagcataattaactagagattttaac

SEQ ID NO: 1883 - DNA, 88 bp, homo sapiens
aatgcttatatactgttggtgggaatgtaaataagagttgctggcaatgctgcggagaaaaggaaatgcttgtatactgttggtggga

SEQ ID NO: 1884 - DNA, 151 bp, homo sapiens
aagtcaaaacattcaaaagaaatgaagatttctacatacccaagaactaatgagctagccagtgagtgagtcattatccatttatgtcacagatggaagcttctaagtcaaaacattcagaagaaatgaagatttctacatacccaagaac

SEQ ID NO: 1885 - DNA, 109 bp, homo sapiens
gagacagggtctccctctgtcacccacgctggagtgaagtgatgcaatctcagctcatatttatttatttatttgagacagggtctccctctgtcacccaggctggagt

SEQ ID NO: 1886 - DNA, 130 bp, homo sapiens
tataattttatcatttccagaatgttacagaaatggaatcatacaatgtaaccttgggattacccagcaccattcatctgtcctccatttttataattttatcatttccagaatgttatagaaatggaat

SEQ ID NO: 1887 - DNA, 87 bp, homo sapiens
gtgtgtgactaaggctagccatagtcacacacttcccaggctgcactgtgaaaagtctcaatggtgtgtgactaaggctagccatga

SEQ ID NO: 1888 - DNA, 133 bp, homo sapiens
cccccaataagtccccaccccaactcaggctgacaatgttttaaattaaactttgacttgtttcaaaatctcttaatgaacatttcccccaataagtccccaccccaactcaggctgacaatgttttaaatta

SEQ ID NO: 1889 - DNA, 90 bp, homo sapiens
tggtcttgaactcctgacctcagatgatccgaagagagggtttcaccatgttggccaagctggtctcgaactcctgacctcagatgatcc

SEQ ID NO: 1890 - DNA, 120 bp, homo sapiens
taaagtttttattagttttcctttttctttctttctttttttttgagacggagtctctctctatcacccaggctggagttaaagtataaagtttttattagttttcctttctctttcttt

SEQ ID NO: 1891 - DNA, 185 bp, homo sapiens
tatctattatctatctatctgtctatctatctatctatctatcacctatctatcacctatcttcatcaccaccatcattatctatcgtctatgtatctacctattatctatctatctatctatttatctatcatctatcttcatcactactattattattattatctatcatctatctatctatc

SEQ ID NO: 1892 - DNA, 81 bp, homo sapiens
tggttagtcaaattattattattattaaattattaaattattattgcagagaaattctagttagtcaaattattattatta

SEQ ID NO: 1893 - DNA, 79 bp, homo sapiens
ggaagttcccaactttcccacattttcctgttttctgagcctccaagtctctaggaagttccaaactttcccacatttt

SEQ ID NO: 1894 - DNA, 137 bp, homo sapiens
ttttgcattttgtagccacattcactttgtaaaattgaatgtcagttagaagtgaatttttgcacacgtaggtgattcacccatttgagctaagtgacttttgcattttgtagccacattcactttgtaaaattgaa

SEQ ID NO: 1895 - DNA, 95 bp, homo sapiens
aaacaacagagacaacagaaaagacactagaggacaacaggacaaagaggacaaagacactaggactctataagacaacagaaaggacactagag

SEQ ID NO: 1896 - DNA, 135 bp, homo sapiens
aaacatcaagttttcattcgcttattttctaacaaaaatattccaaatgcatctattttgctgttagtatataaatgtcagaatcagagtttactagaaacatcaagttttcattcggttattttctaacaaaaa

SEQ ID NO: 1897 - DNA, 93 bp, homo sapiens
ggcagggaacttaaggccaattagtgctgacttcctaaagctgattcaaggggaaacaagaagatctgggggcagggaacttaaggccaatta

SEQ ID NO: 1898 - DNA, 136 bp, homo sapiens
aatttataatagtactagagtcacaatatgagtttagtaaatgatagtactttatagagtcattgtaaagtgattaaaagaaattctttaaagaatttaaaatagtactagagtcacaatatgagtttagtaaatg

SEQ ID NO: 1899 - DNA, 93 bp, homo sapiens
caaggttaacatacaaaagtcaattttttgtattgtattgactcattgatgtgatggaagatattaattcaaggttaacatacaaaagtcaat

SEQ ID NO: 1900 - DNA, 138 bp, homo sapiens
cactctaaggatattatcctcaatcattagatctctctgggcttaggttctaggcaggtggatggtggagatatgggaatatgtggtaggtcactctaaggatattatcctcaatcattagatctctcagggcttagg

SEQ ID NO: 1901 - DNA, 116 bp, homo sapiens
atcagcagggtccagggaccattgcaggttcttgggcaagaggggtttctgctgctgcattggtgagtgcaactattctgatcagcagggtccagggaccattgcaggttcttggg

SEQ ID NO: 1902 - DNA, 111 bp, homo sapiens
aaatgcaccaatcagcgctctgtgtctagctaaaagattgtaaatgcacaatcagcactctgtaaaatggaccaatcagcgctctgtaaaatggaccaatcagcagcatgt

SEQ ID NO: 1903 - DNA, 128 bp, homo sapiens
aaatgtggaataaatatttttctatccaatatgggtttctgtaggagggatattgactgcagctgtaaataaaaggacatgattattgaaatgtggaataaacatttttctatccaatatgggtttct

SEQ ID NO: 1904 - DNA, 98 bp, homo sapiens
aaaaagaggaataagaaaagattgtgctaatcactttactgagaaaaattattatagcagcttatatacaaaaagaggaataagcaaagattgtgcta

SEQ ID NO: 1905 - DNA, 94 bp, homo sapiens
ttcctaatggcaataaagggagttacgcaatttcctattgtatacaattgccattaggaacatgcaacattcctaatggcaataaagggagtta

SEQ ID NO: 1906 - DNA, 95 bp, homo sapiens
attggtgcatttacagtcctttagctagacagagtgcttattggtgcatttttacagagtgctaattggtgcatttacaatcctttagctagaca

SEQ ID NO: 1907 - DNA, 127 bp, homo sapiens
tttctctcaattcttctctcaagaaggactgctttcagaatcatgttgttgagaggatgtgggatagaaatataagcacctaatttctctcaattcttctctcaagaaggactgctttcagaatcat

SEQ ID NO: 1908 - DNA, 76 bp, homo sapiens
tttagctatatcttaatattgctatttaaagtgagattattgtaaacaaaatatttagctatatcttaatagtgct

SEQ ID NO: 1909 - DNA, 93 bp, homo sapiens
tttacaaacttctagctagccacagagcactgatgggtgcgtttttacaaagtgctgattcgggcattttacaaacctctagctagccacaga

SEQ ID NO: 1910 - DNA, 123 bp, homo sapiens
acgaatcgaagggaaaaaatggtcagcgaacatatactgaactgtacctagcaggactctaattgtataatgagttttcaatacgaatcgaagggaaaaaaatggtcagcgaacatatactga

SEQ ID NO: 1911 - DNA, 78 bp, homo sapiens
gtctctaggaagttccaaactttcccacatcttcctatcttctgagccctccatgtctctaggaagtaccaaactttc

SEQ ID NO: 1912 - DNA, 92 bp, homo sapiens
ggtagacatggtactgccttttggggataatacacacacacacacacacacacacacacacacacacggtagacatggtactgccttttggg

SEQ ID NO: 1913 - DNA, 104 bp, homo sapiens
agctagacacagagcactgattggtgcatttacaaaccttgagctagacacagcactgattggtgcacttacaaaccttgagctagacagagtggtgattggtg

SEQ ID NO: 1914 - DNA, 85 bp, homo sapiens
ctgaccaaacaccatatccaagccaatcccaccatatcccagcaatatctagactgatactgaccaaacaccatatcccagccaa

SEQ ID NO: 1915 - DNA, 107 bp, homo sapiens
ttagctagacacagagcactgactggtgcatttacagtcctttagctagacagaaaatttctccaagtgccctaccggattagctagacacagagcactgattggtg

SEQ ID NO: 1916 - DNA, 95 bp, homo sapiens
taagggattgaaacttcaaccaatcaaaggggactttcccctaagccaaagtgagtcccagctgcaaattaagggattgaaacttcagccaatca

SEQ ID NO: 1917 - DNA, 108 bp, homo sapiens
caccaatcagtactctgtgtctagctcaaggtttgtaaacacaccaatcagcaccctgtgtctagctaaagctttgtaaatgcaccaatcagtgctctgtgtctagct

SEQ ID NO: 1918 - DNA, 123 bp, homo sapiens
agaccagcttgctctctctggtgccacagccattcatccagattcaacaccaagaccattcatccagatccaagaccaagaccagcttgctctctctggtgcgacagccattcatccagattc

SEQ ID NO: 1919 - DNA, 74 bp, homo sapiens
acacaaaggttctccacgtccccactagattagctagatacagagtgtcaacacaaaggttctccaagtcccca

SEQ ID NO: 1920 - DNA, 100 bp, homo sapiens
agcgagacttcatctcaaaaacaaagaaagaaaaagaaatgaatcattaaattcatctgaaattttggataacacagcgagactccatctcaaaaacaaa

SEQ ID NO: 1921 - DNA, 114 bp, homo sapiens
gcaattctcccacctcagcctcaagaatagttattatgcggtgacaatcatggttcactacagcctcaacctcctggctcaagcaatcctcccacctcagcctcaagaatagtt

SEQ ID NO: 1922 - DNA, 81 bp, homo sapiens
gtaaactagattagcagactgggtgtcagaagtgtagaccttctactggctcacaacggtagactagattagcagactggg

SEQ ID NO: 1923 - DNA, 102 bp, homo sapiens
tcttccttttatttagctgatatttatatagctatctttactttttttcttttgtgtattcatagaatcttagtgtttcttccttttatttagctgacattt

SEQ ID NO: 1924 - DNA, 105 bp, homo sapiens
ttttttccacagcaacatgtcatacttttaagaaccattgatctacagaagagaagaagaaaaaaatagactgtcctcagttttttccacagcaacatgtaatac

SEQ ID NO: 1925 - DNA, 124 bp, homo sapiens
acataaattgtgaagatttcatggacatttattagttcccccaaattaatacttttatcatttcttacacctgtctttactgcagtctctgaacataaactgtgaagatttcatggacatttat

SEQ ID NO: 1926 - DNA, 104 bp, homo sapiens
aaaagctgtgatataagtggctgattttattctaaagttaatagagataagaatccaaatggcctgaaagaggttaaaaggctgtgatataagtggctgatttt

SEQ ID NO: 1927 - DNA, 100 bp, homo sapiens
tgttgcttcaatagtctaagggtcaaagaattccaaagcagagactgatctgagaggtggattcatgaataaggcagtgttgcttaaatagtctaagggt

SEQ ID NO: 1928 - DNA, 96 bp, homo sapiens
atctaatggaagagatacaggcttttccctaaaagtccctgccaaggacagaattccccacccgatctaatggaagagatacaggcctttccctaa

SEQ ID NO: 1929 - DNA, 144 bp, homo sapiens
ggattgtaaaatgcaccaaccagtgctctgtagctagcaaggggattgtaaaatgcaccaatcagcgctctgtaaaaactcaccaatgagcactctgtagctagcaagaggattgtaaaatgcaccaatcagcgctctgtaaaa

SEQ ID NO: 1930 - DNA, 98 bp, homo sapiens
tctgtagctagctagaggttttgtaaaatgcaccaatcagtgctctgtaaaaacacaccaatcagcgttctgtagctagctagaggtttgtaaaatgg

SEQ ID NO: 1931 - DNA, 104 bp, homo sapiens
caccaatcagcactctgtatctagctaatctggtggtgacttagaaaacctttatgtctagctaaaggattgtaaatacaccaatcagcactctgtgtctagct

SEQ ID NO: 1932 - DNA, 101 bp, homo sapiens
aggtgtacacacatggtgtacacggcctgtgtcatcaggagtaacattcccctaggatattacaaataatatcacagcaggtgtacacacatgttgtacac

SEQ ID NO: 1933 - DNA, 113 bp, homo sapiens
agccagcccctcttgcccgcctggctcttaggacccccatcgcaggggggcgaggcgccccccgcgatgcggggagtaagagccagtccctcttgcccgcctggctcttagga

SEQ ID NO: 1934 - DNA, 93 bp, homo sapiens
gcaagtcccacttttctgggggaaggggcaagaacccctcaaccccttctccttcacccttagcagcaagtcccacttttctgggggagggga

SEQ ID NO: 1935 - DNA, 93 bp, homo sapiens
atcagggatttaaactccttaaggtaagggaaacacacacacacacacacacacacacacccacacacgatcagggatttaaattccttaagg

SEQ ID NO: 1936 - DNA, 76 bp, homo sapiens
gccgttcacctgtgccactgtctactgtaccctacgacttttcacttattagtgctgttcacctgtgccactgtct

SEQ ID NO: 1937 - DNA, 101 bp, homo sapiens
gccccgaggcagagacaggccaggtgtgcctcccaggtgggtctccaggcagagggattggcaatgacagcagccctgaggcagagacaggccaggtgtgc

SEQ ID NO: 1938 - DNA, 75 bp, homo sapiens
gtggggacttggagaacctttgtgtggacactctgtatctagctaatctagtggggacgtggagaacctttgtgt

SEQ ID NO: 1939 - DNA, 102 bp, homo sapiens
tggcagagcagatcccataggaatggtcatacattttggttggttggtttgtttgtttattttttgtagagatggcagagcagatcccataggaatggtcat

SEQ ID NO: 1940 - DNA, 83 bp, homo sapiens
gggggttcttgccctccagaaaagcagagaaggtgttggggcacggaaataagggattgggggttcttgccctctagaaaagc

SEQ ID NO: 1941 - DNA, 97 bp, homo sapiens
gtgtgtgtgtgtaagggggagactggcctttgacggtgtgtgtgtgtgtgtgtgtgtgtgtgtgtgtgtgtgtgtaagggggagactggcccttgac

SEQ ID NO: 1942 - DNA, 80 bp, homo sapiens
caagactctaggaagttccaaactttcctgcatcttcctgtctcctgagccctccaagtctctaggaagttccaaacttt

SEQ ID NO: 1943 - DNA, 263 bp, homo sapiens
agggaaagggaaagggaagggaagggaagggaagaagggaagggaagggaaataaagaagggaagggaaataaagaagggaaaggaagggaagggaagggaaataaagaagggaagggaaggcaagggaaataagagaaaggagggcaagggaaggctagggaaggcaagggaagggaggggagggggagggggaggggatgggggaggggaaggcagggcagggcagggcagggaaaggaagggaagggaagggaagggaag

SEQ ID NO: 1944 - DNA, 273 bp, homo sapiens
agctagatacaaaggttctctatgtccccatcagattagttagatacagagtttcgacacacaggttctccaaggccccaccagagcagctagatacagagtgtcgattggtgcattcacaaaccttgagctaaacacagggtgctgattggtgtgtttacaaagcttgagctagatacagagtgccgattggtgtatttacaatccctgagctagacataaaggttctccacgtcctcaccagagcagctagatagagagtgtcgattggtg

SEQ ID NO: 1945 - DNA, 148 bp, homo sapiens
ccgcttttctgagggagggacaagtaccccaaccccttctctccatgtctctaccccttctctgcttttctgggggaggggcaaatacccctcaaccccttctccttcacccttagtggcaagtcctgcttttctgggggaggtgcaa

SEQ ID NO: 1946 - DNA, 71 bp, homo sapiens
taagaatcaaggatagccaagaaactcttgaaaaagaaaaaaaaatgttaagaaccaaggatagccaagaa

SEQ ID NO: 1947 - DNA, 96 bp, homo sapiens
aaatccattcaaccatttttaataaagactatgcaatatatcataatattcaatccattcagccacttaaatccattcaaccattttaataaagat

SEQ ID NO: 1948 - DNA, 130 bp, homo sapiens
gggttaggagtctctaatagacatcctgaaataagcatgtacgaaagaactctagactcacatatccagtctgcctgggagtagggttaggagtctctaatagacatcctgaaataagcatgtactaaag

SEQ ID NO: 1949 - DNA, 130 bp, homo sapiens
ggcagatcatctgaggtcaggagttcgaaagcagcctggcaaacacggtgaaatagcagaatgaagagcatgcactgggaggccaaggcaggcagatcatctgaggtcaggagttcgaaaccagcctggc

SEQ ID NO: 1950 - DNA, 151 bp, homo sapiens
atggaagcaactttggaactgggtaacaggcagaggttggaagagtttggagggctcagaagaggacataaaaatgtgggaaagtttggaacttcctagagaattggagaactcagaagacaggaagatgtgggaaagtttgaaacttcct

SEQ ID NO: 1951 - DNA, 192 bp, homo sapiens
tctagctaaaggattgtaaatgcaccaatcagcactctgtgtctagctaaaggtttgtaaacgcaccaatcagcactctgtgtctagctaaaggtttgtaaatgcaccaatcagtgctctgtgtctagctaacctggtggggacttggagaacttttctgtctagctaaaggattgtaaatgcaccaatcag

SEQ ID NO: 1952 - DNA, 103 bp, homo sapiens
aaaattttactttaagttctgggatacatgcgctgatggttatagactttttttaaaaaaaccttttttaaacaaaattttagtttaagttctgggatacatg

SEQ ID NO: 1953 - DNA, 100 bp, homo sapiens
ttggtttccaattctaaacacagaattgagttggtccaagtgttgtgggttactgttaagctaaacacagaattggtttccaattctaaacacagaattg

SEQ ID NO: 1954 - DNA, 84 bp, homo sapiens
tgtccctctagagaaccctaatacaatactctctctatatatatgtacattccattagttttgtccctctagagaaccctaact

SEQ ID NO: 1955 - DNA, 118 bp, homo sapiens
atcttggctcactgcaaactctgcctcccaggttcacgccattctatcgcccaggatggagtgcagtggcgcgatctcggctcactgcaaactctgcctcccaggttcacgccattct

SEQ ID NO: 1956 - DNA, 100 bp, homo sapiens
agaggagacccacagtgggtagctcttctctgaaggcaggtcatcctgatgagagtccagctctcagcagagaggagacccacagtgggtagctcctctc

SEQ ID NO: 1957 - DNA, 124 bp, homo sapiens
agtaaatgactttgtaactttatttcatcctctccatttacatagggcgtacatcaagtaaatgactagggtgtatactaagtaaatgactttgtaactttatttcatcctcttcatttacata

SEQ ID NO: 1958 - DNA, 80 bp, homo sapiens
ggtgccttcccaggcactggcgctaccactagaccaaggtctgctaagtaacgggtgccttcccaggcactggcgttacc

SEQ ID NO: 1959 - DNA, 117 bp, homo sapiens
atattttccaaatagtctataatgagtatattttctagtctatatcttttcctgtatattttccagtctatatcttttcttgtatattttccaaatagtctataaatgagtatattt

SEQ ID NO: 1960 - DNA, 78 bp, homo sapiens
accctctagactgaggcatgccagagtccagccttggtacagtcaacctaccaccctctagactgaggcatcccagag

SEQ ID NO: 1961 - DNA, 75 bp, homo sapiens
ctcctaggtatacacccaagagaagtgaaaatgtattactcagcaattctgctcctaggtatatacccaagagaa

SEQ ID NO: 1962 - DNA, 200 bp, homo sapiens
ccgttttgacagggtgctgattggtgcgtttacaatccctgagctagacacaaacgttctccaagtccccactagattagctagatacagagtgctgattggtgtatttacaaaccctgagccagacacagggtgctgattggtgtgtttacaaaccttgagctagatacagagtgctgattggtgtatttacaatccct

SEQ ID NO: 1963 - DNA, 80 bp, homo sapiens
aataaaactttgagcttttcaaagtgatcgtgcaagataaacccttcagagaggagaagtaaaactttgagcttttcaaa

SEQ ID NO: 1964 - DNA, 89 bp, homo sapiens
agaggccaaggtgggaggatcacttgagcccaggagttcaacaacagcctgtcttgcccagacagaggccaaggtgggaggatcacttg

SEQ ID NO: 1965 - DNA, 97 bp, homo sapiens
aaaatcttataagcattcatagaaaaagacacctagaaacatcagtgttaacttttgataaatataaacaaaatcttaaaagcattcatagaaaaag

SEQ ID NO: 1966 - DNA, 114 bp, homo sapiens
cggcatcagagggagaccgtggaaagagagggagtggaaagagagggagagggagaccgtggggagatgggcgacgggagatgggagacgggagagggagagggagaccatggg

SEQ ID NO: 1967 - DNA, 83 bp, homo sapiens
tctctagaaagttccaaactttcccacatcttcctgtcttctgagccctccaagtctctaggaagttccaaactttcccacat

SEQ ID NO: 1968 - DNA, 90 bp, homo sapiens
taggtattataagtaatctagagatttaaagtatatcaactatttacatagcatttacattacattaggtatcataagtaatctagagat

SEQ ID NO: 1969 - DNA, 134 bp, homo sapiens
aaacccacagccaatatcatactgaatgggctaaaaactcttaataaattaggtattgacgggacgtatctcaaaatagtaagagctatctatgacaaacccacagccaatatcatactgaatgggcaaaaacc

SEQ ID NO: 1970 - DNA, 73 bp, homo sapiens
acactcctatcacccaggaaattccaagagatttaggagctctgtgtcagacactcctatcactcaggaaatt

SEQ ID NO: 1971 - DNA, 136 bp, homo sapiens
gaacataaattgtgaagatttcatggacatttatcagttcccaaaattaatacttttataatttcttacacctgtctttactgcaatctctgaacataaattgtgaagatttcatggacatttatcagttcccaaa

SEQ ID NO: 1972 - DNA, 93 bp, homo sapiens
ataaagaaaaattttatcctttactttaacagttgcccatgcttaaaaatagaaaaatccttcctcacttacaaagaaaaattttatccttta

SEQ ID NO: 1973 - DNA, 95 bp, homo sapiens
tgcagctctcagcagagaggaggctctagagtgggtagctcctctctgcaggcaggtcatcccatcatttctgcagctctcagcagagaggagac

SEQ ID NO: 1974 - DNA, 125 bp, homo sapiens
aaaaaaaggaagagaaagggaaggagtgttagattgacctaggtcaatccctctaatgcctggaacttccatctcataggggacaaaaaaaggaagagaaagggaaggagtgttagattgaccta

SEQ ID NO: 1975 - DNA, 85 bp, homo sapiens
atctgtgaggggaaggctgagagaggacgcagacaagagttttgggaagatttctgacatctgtgaggggaaggcttagagagga

SEQ ID NO: 1976 - DNA, 93 bp, homo sapiens
ctttgtgtgtttgtctctttcttgttcatcaagaaaatggttccaagaactaatttcttgtcctttatgtgtttgtctctttcttgttcatca

SEQ ID NO: 1977 - DNA, 93 bp, homo sapiens; identical to SEQ ID NO: 1976

SEQ ID NO: 1978 - DNA, 98 bp, homo sapiens
tttggaaacaaaagtgaggggagcagcaagagagtgacacaacaaggcatgaactttatttataaagaaatttttggaaacaaaagtaaggggagcag

SEQ ID NO: 1979 - DNA, 112 bp, homo sapiens
tttgttaaattatatcctattcttgaggctactttgacaacttcaggatctatagaaggttaataattaatatttgttaaattatatcctattcttgaggctactttgacaa

SEQ ID NO: 1980 - DNA, 99 bp, homo sapiens
ataagcccaaggagattgggggcctatattcaccattaggggaacctcataaggccaccagtggactctataagcccaaggagattgagggcctatatt

SEQ ID NO: 1981 - DNA, 146 bp, homo sapiens
gcttttctggggggcaagaaacccccaaatccttctccttcacccttagtggcaagtaccgcttttctagggggcaagaaccccccaaccccttctctccatgtctctaccccttctctgcttttctgggggcaagaaccccccaa

SEQ ID NO: 1982 - DNA, 105 bp, homo sapiens
ttccgcctcccaaagtagctggaactactaggctgggtagtctccctcccaagggtagtccacccctcccaagggtagttccgcctcccaagtagctggaactac

SEQ ID NO: 1983 - DNA, 79 bp, homo sapiens
tgaacaaacaaatggctttcttgttttgcagaagtaagaagagaaaaataaaagaatgaataaacaaatggctttcttg

SEQ ID NO: 1984 - DNA, 128 bp, homo sapiens
aaaaaaagaatttcatgagataagtcaagttcttatcgctccactgcacttcagcctggcgacagagcaagactctgtctcgaagaaaaaaagaaaaaaacaatttcatgagataagtcaagttctta

SEQ ID NO: 1985 - DNA, 74 bp, homo sapiens
aatgtcatcagttaaggcaggacctgccattttcacttcttttgtagtggaatgtcatcagttaaggcaaggac

SEQ ID NO: 1986 - DNA, 93 bp, homo sapiens
aatgattgtccttaaatggagggaagagagcaggagccatgggcctttgtcttttacagggatgtcactaatgattgtccttaaatggagaga

SEQ ID NO: 1987 - DNA, 80 bp, homo sapiens
cctttgtctaagatgggttaaaaggagagaattaaaaaaaaatttggaatgcatatgcctttgtctaagatgggttaaaa

SEQ ID NO: 1988 - DNA, 76 bp, homo sapiens
ttcctgccttaactgatgacataccaccacaaaagaggtgaaaatggcccattcctgccttaactgatgacattac

SEQ ID NO: 1989 - DNA, 134 bp, homo sapiens
agcatctttagttccttgatcactgacaagttgcaggactcatctaccaaaaatgacttcacctgcaggtcagctgagtccacttcagcatctttagttccttgatcactgacaagttgcgggactcatctacc

SEQ ID NO: 1990 - DNA, 94 bp, homo sapiens
tacatatacatacactatatatacatatacatacactatattagtacaggtaagtactatctatatgtatgtacatatacatacactatattag

SEQ ID NO: 1991 - DNA, 113 bp, homo sapiens
tccccttttatcttcctgctaggccttggcagtagctatgaaattgttgtttgaatagaaaaagtagcccaagtattctccccttttatcttcctgctaggtcttggcagtag

SEQ ID NO: 1992 - DNA, 85 bp, homo sapiens
ctgcttttctgggggagggggaagtaccccaacctcttctctccgtggttctaccccttctctgcttttctgggggaggggcaag

SEQ ID NO: 1993 - DNA, 127 bp, homo sapiens
attttacagagcgctgattggtgcatttttacagagtgctgattggtgcatttacaatcctttagctatacacagagtgctgaatgctgtgtttttacagagtgctgattggtacatttacaatcct

SEQ ID NO: 1994 - DNA, 120 bp, homo sapiens
ttttgtttatatctataacatctaaattcagacacatattacattttagaagagggatgtaagacatttattctatataagatattttgtttatatctataacatctaaatcagacacac

SEQ ID NO: 1995 - DNA, 125 bp, homo sapiens
gaacataaattgtgaagatttcatggacatttattagttccccaaattaatacttttataatttcttatgcctgtctttactgcaatctctgaacataaattatgaagatttcatggacatttat

SEQ ID NO: 1996 - DNA, 114 bp, homo sapiens
aataaaattttaagaaaatgtttaaagtagtgaaggactccaaattatctcataaatctaacctgaaaagatgagtctgttacataaataaaattttaagaaatgtttaaagta

SEQ ID NO: 1997 - DNA, 95 bp, homo sapiens
ctctgtgttggggctccaaccccacatttcccacagctccattaggtagtgccctcgtggggcctctgtgttggggctccaaccccacatttccc

SEQ ID NO: 1998 - DNA, 76 bp, homo sapiens
gttcctgccttaactgatgacattccaccacaaaagaagtgaaaatggcctgttcctgccttaactgatgacattc

SEQ ID NO: 1999 - DNA, 75 bp, homo sapiens
gttcctgccttaactgatgacattacaccaaaaaagaagtgaaaatggcctgttcctgccttaactgatgacatt

SEQ ID NO: 2000 - DNA, 83 bp, homo sapiens
atgtatttgcaaagtttccgattttttttgctgattttctatgtatttgcattttcgatgtatttgcaaagtttccaattttt

SEQ ID NO: 2001 - DNA, 79 bp, homo sapiens
tactatatgtgtatttgtgtatatatagatacttaaatattcatgacccagctactatatgtgtatttgtgtacatata

SEQ ID NO: 2002 - DNA, 94 bp, homo sapiens
tagcatttagtacatggaagagaaagggagacatacagatgatgactaaaaaattattaatatgtcatagcatttagtacatggaagagaaagg

SEQ ID NO: 2003 - DNA, 117 bp, homo sapiens
ttgacctcaattatttctttaatttgtatttttaattaaaaataatattgtatgtatttgtgttcatggacaatcatctcttgacctcaattatttctttaatttttatttttaatt

SEQ ID NO: 2004 - DNA, 79 bp, homo sapiens
cttcaaaggagagatgcaatcctatgtatcatgatcctttctatcctatcatgatccttcaaaggagagatgcaatcct

SEQ ID NO: 2005 - DNA, 102 bp, homo sapiens
ggcaagtacccctcaaccccttctccttcacccttagcggcaagtcccgcttttctgggggaggggcaagtacccctcaaccccttctccttcactcttagc

SEQ ID NO: 2006 - DNA, 107 bp, homo sapiens
taaaggtttgtaaacgcaccaatcagcattctgtaaaaatgcaccaatcagcactctgtgtctagctaaaggtttgtaaacgcaccaatcagcactctgtaaaaatg

SEQ ID NO: 2007 - DNA, 92 bp, homo sapiens
caccaatcagtgctctgtgtctagcttaagatttgtaaacgcaccaagcagcactctgtaaaaatgcaccaatcagcgctctgtgtctagct

SEQ ID NO: 2008 - DNA, 73 bp, homo sapiens
caccagattagctagatacagagcgcggacacaaaggttctccaagtcctcaccagagtagctagatacagag

SEQ ID NO: 2009 - DNA, 94 bp, homo sapiens
tccagaggagcttgaacaataaatcagatcttttaaggctactgtaactttctgccttgattccagaggagcttgaacagtaaatcagatcttt

SEQ ID NO: 2010 - DNA, 92 bp, homo sapiens
tttttttaaactgcttaaaagaatggccttagcatgccaaagtttaagagcccatccccatttttttttaactgcttaaaagaatggcctta

SEQ ID NO: 2011 - DNA, 76 bp, homo sapiens
gattgtgccactgcattcctgcctgagtgacagagcagtgccactgtgacagagtgtgccactgcattcctgcctg

SEQ ID NO: 2012 - DNA, 80 bp, homo sapiens
tgcaggtttgctacatagataaacttgtttatctaagtgcaggtttgctacatgtgcaggtttgctacacgtgcaggttt

SEQ ID NO: 2013 - DNA, 113 bp, homo sapiens
tccaatgaattcaccactggatttagaataattgctagaacacagaataagcaactcatctcagtttatttggccctccaatgaattcaccactggatttagaataatcgcta

SEQ ID NO: 2014 - DNA, 115 bp, homo sapiens
ttttttgtaatttttctatgtccagggccatttcaaaacttgtcaaattatcaaacccatatttttttccttattacaattaatccattttttgttaatttttctatgtccaggg

SEQ ID NO: 2015 - DNA, 103 bp, homo sapiens
tcccagaaataatttaatgagagccaaattcctttccttttagaaatattgtagaagccactatttatagaaatagtgaatcccagaaatgatttaatgagag

SEQ ID NO: 2016 - DNA, 104 bp, homo sapiens
aatgaagcccttacacacacacacacacacacacacacacacacacacacacacggtcctaaaatgaagcccttacacacacacacacacacacacacacacac

SEQ ID NO: 2017 - DNA, 104 bp, homo sapiens
gcttgaacccaggaggcagaggttacatggtggtgggcgcctataatcccagccacttgggaggctgaggcaggagaatcgcttgaacgcaggaggcagaggtt

SEQ ID NO: 2018 - DNA, 101 bp, homo sapiens
aacctgcaatggtccctggaccctgctgatcggaatagttgcactcactgacacagcagcagaaacccaagaacccgcaatggtccctggaccctgctgat

SEQ ID NO: 2019 - DNA, 88 bp, homo sapiens
gtaaatcaatatgcttaaagcacatacagtaatgctgggaaaggcaagttctgttggaggattatgtaaatcaatatgtttaaagcac

SEQ ID NO: 2020 - DNA, 103 bp, homo sapiens
tattttatagggtttcatacatatgtagtatatatgtatgaaatatatatataatagggtttatatatatgagaaatacatattttgtagggtttcatacata

SEQ ID NO: 2021 - DNA, 75 bp, homo sapiens
aaaggttctccacgtccccaccagattagctagatacagagtgtccacacaaaggttctccaagtccccaccaga

SEQ ID NO: 2022 - DNA, 75 bp, homo sapiens
aatgtcatcagttaaggcacgaacaggccattttcacttcttttgtggtggaatgtcatcagttaaggcaggaac

SEQ ID NO: 2023 - DNA, 157 bp, homo sapiens
ttgtgaacccaccaatcagcactctgtgtctagctagaggtttgtaaaagcaccaatcagcgctctgtgtctagctaatcgggtaggggacttggagaacttttgtgtctatctaaagggttgtaaatgcaccaatcagcgctctgtgtctagctaa

SEQ ID NO: 2024 - DNA, 186 bp, homo sapiens
agctagatacagagtgtcgattggtgcactcacaaaccttgagctaaacacagggtgctgattggtgtgtttacaaaccttgagctagatacagagtgccgattggtgtatttacaatccctgagctagacataaaggttctccaaggccccaccagagcagctagatacagagtgtcgattggtg

SEQ ID NO: 2025 - DNA, 96 bp, homo sapiens
agtataacagctttcagtaatttctgtgagtccttttagcaaattatcaaacctattacttagtataacagctttcagcaatttctgtgagtcctt

SEQ ID NO: 2026 - DNA, 109 bp, homo sapiens
tatttatttatttttgcattttctattttattagatctaaagcttccaaaaggtacgttgcttgttttatgtatttatttatttttgcattttctattttattagatct

SEQ ID NO: 2027 - DNA, 78 bp, homo sapiens
gctagcttgagttgtttcttaatcaaggtaggggtacgtgcagtgagttgttagctagttgagttgtttcttaatcaa

SEQ ID NO: 2028 - DNA, 100 bp, homo sapiens
aacttatttcaaattggagtcaattttattcacagtagaacttatttcaaattggagtcaattttacccacagtagaacttatttcaaattggaatcaat

SEQ ID NO: 2029 - DNA, 117 bp, homo sapiens
aaagaatattaaagacaatatagagtattaaggacaatattaaagacaagaatattaaagaatattaaagacaatataatctaaacttccaagaaagaaattaaagaatattaaaga

SEQ ID NO: 2030 - DNA, 106 bp, homo sapiens
tggttattttgtattctgtgtagtttagctgcagttggtttgtttgtttggttggttggtttgttggtttgtttagggcagttggttattttgtattctgtgcagt

SEQ ID NO: 2031 - DNA, 100 bp, homo sapiens
attttggttaattttgatttatgtattttatcattattaccaaaaatatggaaatatttcattattaatattttggttaattttgatttgtgtattttat

SEQ ID NO: 2032 - DNA, 108 bp, homo sapiens
ttgtatatgcaccaatcagcactctgtgtctagctcggggtttgtggatgcaccaatcagcactttgtgtctagctcaaggtttgtaaatgcaccaatcagcaccctg

SEQ ID NO: 2033 - DNA, 78 bp, homo sapiens
agaattctaggaactaaagagaattagttctagaattctagaattgtaggccttcacaattctaggaactaaagagaa

SEQ ID NO: 2034 - DNA, 83 bp, homo sapiens
ttaattggttatattcccatttagaattgccgaaacttcttttccaagtgttagttaattgtttatattcccatttagaattg

SEQ ID NO: 2035 - DNA, 96 bp, homo sapiens
tgcccaggctggattgcagtaatgagactgcttatttatttatttatttattgaggcaaggtcttgctctgttgcccaggctagattgcagtaatg

SEQ ID NO: 2036 - DNA, 144 bp, homo sapiens
tcgtggtctcgctggctcaggagtgaagctgcagaccttcgcggggagtgttacagctcttaaggcagcacctctggagttgtttgttcctcccggtgggctcgtggtctcgctggcttcaggagtgaagctgcagaccttcgc

SEQ ID NO: 2037 - DNA, 112 bp, homo sapiens
actcccagaaatcccaggacaaatttgtatgtcatagaactcccagaaatcccaggacaaatttgtatgtcaaagagaaattggaactcccagaaattccaggacaaatttg

SEQ ID NO: 2038 - DNA, 117 bp, homo sapiens
tacagccacaccgacctcagaaactccagcctacaacctcaggacttttgtacttaatggtccttctgcctgaaatgattttctccagtacagccacactgacctcagaaactccag

SEQ ID NO: 2039 - DNA, 103 bp, homo sapiens
taactgttgcctggttgactttgcaaaacaaaggggaacaaaacaaaacaaaacacccattacatcatgaagccaacgtaactgttgcctggttgactttgca

SEQ ID NO: 2040 - DNA, 106 bp, homo sapiens
catctgcaagcaaagatagtttgagttcctttctagctatttgaagtggggtttttttttatatataggattacaccatctgcaagcaaagatagcttgagttcct

SEQ ID NO: 2041 - DNA, 82 bp, homo sapiens
tatttcaaagataagcattttgggaatgagagagccaggtcatatacctcaaatatatttcaaagataagcattttgggaat

SEQ ID NO: 2042 - DNA, 103 bp, homo sapiens
tgtaccttgtagagatttataaataaattaatttaataaagtctatagagagattgggaatgggaattataataatgtgtaccttatagagatttataaataa

SEQ ID NO: 2043 - DNA, 146 bp, homo sapiens
ttgatacatgtggccctggtttctttaacttctatgtagtatccaaaatatgaatatattatgattaatacgcttctgagatttattcaagttgatacatgtggccctggtttctttaacttctatgtaatatccaaaatatgaat

SEQ ID NO: 2044 - DNA, 148 bp, homo sapiens
tttttctcaatttttttttggatattttagcctttggaataaaatattccaaattttatttggatatttttctcaatttttatttggatatttagcataaatttatttggataaaaatttatccaaataaatttttatttggatattt

SEQ ID NO: 2045 - DNA, 76 bp, homo sapiens
ggggtctcactatgttgcgcaggatttatttatttatttaatatatagagacgggggtctcactatgttgcccagg

SEQ ID NO: 2046 - DNA, 148 bp, homo sapiens
atgggcatttaggttgattccacatatttgctattgtgaacagtgctgctattgtagaacagtgtatgtactacattttctttattcagtgtatcattgatgggcatttaggttgattccacgtatttgctattgtgaacagtgctgc

SEQ ID NO: 2047 - DNA, 135 bp, homo sapiens
tgtgtggtgggtgagggaagctgggcttcataagagctgcagtgccaggattttcctgtgtgtgtgtgtgtgtgtgtgtgtgtgtgtgtgtgtgtggtgggtgagggaagctgggcttcataagagctgcagtgc

SEQ ID NO: 2048 - DNA, 116 bp, homo sapiens
cttttctttggaaggaaaggaagagagagtatttttaagaagtaggaagtatttttaagaagtaggaagctgctcttgaatttattacttttctttggaaggaaaggaagagagag

SEQ ID NO: 2049 - DNA, 106 bp, homo sapiens
tttcaaagaacatctttatttctgccttcattttgttattggtatgttgtgtctttgttctcattggtttcaaagaacatctttatttctgccttcattttgttat

SEQ ID NO: 2050 - DNA, 78 bp, homo sapiens
tgtatcttggaagtaactaacttgggaacatttactcaatgtctgtaccaccactgtatcttagaagtaactaacttg

SEQ ID NO: 2051 - DNA, 80 bp, homo sapiens
tctttgagtttcttgtatctggatgtctgtatctctcccaacctacttgggaatctttgagtttcttgcatctggatgtc

SEQ ID NO: 2052 - DNA, 87 bp, homo sapiens
gatttacacttaaaaattaaatccagtagcagggcatagagtaagcaggaaagatatattctgatttacacttaaaaattcaatcca

SEQ ID NO: 2053 - DNA, 103 bp, homo sapiens
gaatgagtcagggtggagcaggtaatcagaatgagtcagggtggagtaggtaatcggaatgggggtggagcaagtaattagaatgagtcagggtggagcaggt

SEQ ID NO: 2054 - DNA, 125 bp, homo sapiens
gaacataaattgtgaagatttcatggacatttattagttccccaaattaatacttttataatttcttatgcctgtctttactgcaatctctgaacataaattgtgaagatttcatggacacttat

SEQ ID NO: 2055 - DNA, 90 bp, homo sapiens
gctatttttaacttaaagatattttaaacattttattaatccatccatatttaagaataaacaacctgctatttttaacttaaaaatatt

SEQ ID NO: 2056 - DNA, 105 bp, homo sapiens
tacatatgtatacatgtgccatgttaatgtgctttttttattattatattttaacttttagggtacatgtgcaggttagttacatatgtatacatgtgccatgtt

SEQ ID NO: 2057 - DNA, 105 bp, homo sapiens
caactattctgatcagcagagtccagggaccactgcgggttcttgggcaagaggtgtttctgctgctgcgtcagaagtgcaactattctgatcagcagtgtccag

SEQ ID NO: 2058 - DNA, 89 bp, homo sapiens
tgatgtgtcccagaaaaaatattcaaatttttgaatattattcaaatattctgggacaccttgatgtgtcccagaaaaaatattcaaat

SEQ ID NO: 2059 - DNA, 85 bp, homo sapiens
ttcataaaccagtatcatagttgcttactattatacactctaatggaaagcagtatagtaaattcataaaccagtatcatacttg

SEQ ID NO: 2060 - DNA, 87 bp, homo sapiens
ggaagcagattttccccctttgagtttctgatactactacttctaacaagctgaggaaggttggaagcagattttcccactttgagt

SEQ ID NO: 2061 - DNA, 80 bp, homo sapiens
atagatatacacatatctatcatctatttggtatatatatagatacaccaaatgatagatatacacatagctatcatcta

SEQ ID NO: 2062 - DNA, 141 bp, homo sapiens
cttacaagaggattctaaaatgcaccaatcagtgttctgtagctagcaagaggattgtaaaatgcaccaatcagcactctgtaaaaacacatcaatcagcactctgtacctagcaagagaattgtaaaatgcaccaatcag

SEQ ID NO: 2063 - DNA, 75 bp, homo sapiens
aatgtcatcagttaagacaggaacaggccattttcacttcttttgtggtggaatgtcatcagttaaggcaggaac

SEQ ID NO: 2064 - DNA, 94 bp, homo sapiens
cacacacacacatcttctatgcttttgtgccatctcacacacacacacacacacacacacacacacacacaatcttctatgcttttgtgccatc

SEQ ID NO: 2065 - DNA, 75 bp, homo sapiens
aatatcgaatgtcttctaccacaatatccttatctaaaccagacccctaacaatatcgaatgtcttctaccacaa

SEQ ID NO: 2066 - DNA, 98 bp, homo sapiens
agtgtccagttctcagcagagaggagacttgtagtgagtagctcctttccttaggcaggtcatcctaacgagtgtccagttctcagcagagagaagac

SEQ ID NO: 2067 - DNA, 85 bp, homo sapiens
acttcattaaaaagtggacaagggagaggaacccaagcaaattaacaagaaaaaaaaaaaacttcattaaaaagtgggcaaggga

SEQ ID NO: 2068 - DNA, 110 bp, homo sapiens
cacatacatgtgtatatatgtaacattttgtgatatatatataacattttgtgatttatatgtgtgtatatatatatataaaaaacattttgtgatatatatatcacatt

SEQ ID NO: 2069 - DNA, 86 bp, homo sapiens
aatgttgactatacacacagacacacatacgcagagacatacatttttacttgggtaatgttgactctacacacagacacacatac

SEQ ID NO: 2070 - DNA, 106 bp, homo sapiens
ttttctctatggggagactaaaggcctgtgttagaacttccagtgctactccctttctttctgacacataaagattaaacgttttctctaaggggagactaaaggc

SEQ ID NO: 2071 - DNA, 128 bp, homo sapiens
aggtacttctagaatggcactctgatatcagccacagcaatcagaatccaaggagaaactgtttccttaaacacctctgcccttctcaggtacttctagaatggcagtctgatatcagccacagcaat

SEQ ID NO: 2072 - DNA, 76 bp, homo sapiens
tagtactttataaaataacatgaaatctggactcagtttggactcaatatttagtactttataaaataacacgaaa

SEQ ID NO: 2073 - DNA, 88 bp, homo sapiens
tgtctctaccctctcttttctcctcactttcctggggggcaagaatcccccaccccttctctccatgtctctaccctctcttttctca

SEQ ID NO: 2074 - DNA, 113 bp, homo sapiens
aaggccaaacgttcaaagttgtctacactgtgggaatagttgtatgggaagtgtggccctagagtggagatgctgagaataaggccaaacagttcaaagttgtctacactgtg

SEQ ID NO: 2075 - DNA, 95 bp, homo sapiens
gcctgcagagaggagctacccactgtgggtctcctctctgctaagagttggacactcgttgggacaacccgcctgcagagaggagctacccactg

SEQ ID NO: 2076 - DNA, 115 bp, homo sapiens
aaagcaattcagttattcttacccaaattatttatagtgaatgggaggacttaagtaaagacacttgttttaaaagcaatttagttattcttacccaaattatttatagtgaatg

SEQ ID NO: 2077 - DNA, 84 bp, homo sapiens
ctatcttgtcttgaaatagaagagtagaaaaaaaaaagaactggtctttttttattttttcctatcttgtcttgaaatggaaga

SEQ ID NO: 2078 - DNA, 74 bp, homo sapiens
gtatctagctactctggtggggacttggagaacctttgtgtccacactccgtatctagctaatctggtggggac

SEQ ID NO: 2079 - DNA, 129 bp, homo sapiens
tgggacagttttaatatggactatgtattagatactataccatttaatttaatttcattaaattaatatttatgggacagttttaattaatgggacagttttaatatggactatgtattaaatactata

SEQ ID NO: 2080 - DNA, 98 bp, homo sapiens
cctctcaaagtgctggtataagccacccagctggtctggaattcctagactcaagtgatcctcctgcctcacctctcaaagtgcaggtataagccacc

SEQ ID NO: 2081 - DNA, 78 bp, homo sapiens
agtttcacatatatgatcattaaagaacaaaattaacttcttgcagatttgtttagtttcacatacatgatcattaaa

SEQ ID NO: 2082 - DNA, 129 bp, homo sapiens; identical to SEQ ID NO: 2079

SEQ ID NO: 2083 - DNA, 98 bp, homo sapiens; identical to SEQ ID NO: 2080

SEQ ID NO: 2084 - DNA, 78 bp, homo sapiens; identical to SEQ ID NO: 2081

SEQ ID NO: 2085 - DNA, 153 bp, homo sapiens
tgttggccaggctggtcttgctcctgacctcaggtgatccacccttctcgtaccaccacgcccagctaatttttgtatttttagtagagactgggtttcgctatgttggccaggctggtcttgctcctgacctcaggtgatccacccttctcg

SEQ ID NO: 2086 - DNA, 75 bp, homo sapiens
aatgtcatcagttaacgcaggaacaggccattttcacttcttttgtggtggaatgtcatcagttaaggcaggaac

SEQ ID NO: 2087 - DNA, 76 bp, homo sapiens
tgttagggtagcatcctcttgtcatactgccacactatatattgttcaagattgttagggtagcattctcttgtca

SEQ ID NO: 2088 - DNA, 107 bp, homo sapiens
agctagacacagagtgctgattggtgcatttacaatcctccagctagacatagaagttctccaagtccctaccagattagctagatacagagtgctgattggtgcat

SEQ ID NO: 2089 - DNA, 105 bp, homo sapiens
tctcggctcactgcaacctccgccttgctggttgagatggattctcgctctgtagcccaggctggagtgcagtggcgcggtctcggctaactgcaacctccgcct

SEQ ID NO: 2090 - DNA, 138 bp, homo sapiens
ctatgactctgttttatggaatatttggttcatttttttttccattgagcagccttctagattggcaagaaagtggcatcaggtagataaactatgactctgtgtttatggaatatttggttcatttttttttccatt

SEQ ID NO: 2091 - DNA, 110 bp, homo sapiens
tctccctgcgaggtaagacatagagatggaagacagtgatactggtgatcatgcatgttactgcccccgtctccctgcgaggtaagacatagagatggaagacagtgata

SEQ ID NO: 2092 - DNA, 75 bp, homo sapiens
tccacactctgtatctagctactctggtggggacttggagaacctttgtgtccacactctgtatctagctaatct

SEQ ID NO: 2093 - DNA, 75 bp, homo sapiens
aatgtcatcagttaaggcaggaacaggacattttcacttgttttgttgtggaatgtcatcagttaaggcaggaac

SEQ ID NO: 2094 - DNA, 75 bp, homo sapiens
aatgtcatcagtgaaggcaggaacaggccattatcacttcttttgtggtggaatgtcatcagttaaggcaggaac

SEQ ID NO: 2095 - DNA, 169 bp, homo sapiens
gggagacccgcagtgggtagctcatctccactggcagggtatcctgatgagtgttcagctttcaacaactggagaccctggagtgggtagctcctctccgtggctgattgtccactcatttactcagctctcagcagggaggagaccctggagtgggtagctcctctcc

SEQ ID NO: 2096 - DNA, 101 bp, homo sapiens
aaatagagaattatgacgatttgaaactccactagcacaataacatttctctgtcttattcactgctatatttgtgaaatagagaattatgacaatttgaa

SEQ ID NO: 2097 - DNA, 186 bp, homo sapiens
agctagatacagagtgtcggttgttgcattcacaaaccttgagctaaacacagggtgctgattggtgtgtttacaaaccttgagctagatacagagtgccgattggtgtatttacaatccctgagctagacataaaggttctccacgtccccaccagagcagctagatacagagtgtcgattggtg

SEQ ID NO: 2098 - DNA, 75 bp, homo sapiens
aatgtcatcagtgaaggcaggaacaggccattttcacttcttttgtggtggaatgtcatcagttaaggcaggaac

SEQ ID NO: 2099 - DNA, 102 bp, homo sapiens
ttcagctatcagcagagaggagaccctggagtgggtagctcctctccacagctggttgtcccatcatctcttcagctttcagcagagaggagaccctggagt

SEQ ID NO: 2100 - DNA, 73 bp, homo sapiens
agttgctgtatcatggagtaaagctaggccttcagaacgagtgaaactaaagttgctgtatcatggaataaag

SEQ ID NO: 2101 - DNA, 76 bp, homo sapiens
ttgttatattttgttatgtttagttgctgtagtttgttatattttatgtttgtatatgttgttatattttgttatg

SEQ ID NO: 2102 - DNA, 99 bp, homo sapiens
caccattttgaaaaaaataaaaattaaataaatataagtaagctagtcagttatatattattgtcaccattttgaaaataaataaaaattaaataaata

SEQ ID NO: 2103 - DNA, 137 bp, homo sapiens
actctatgtaaaccttgccatattgaagaaaatactttttaaatggttgactaatcaatagacagaattacattttcttgacactattaaatgcactctatgtaaaccttgccatattaaagaaaatactttttaaa

SEQ ID NO: 2104 - DNA, 96 bp, homo sapiens
gtaacataagtctctagactaaaatgtaacataacaaatggtataaaaataagttaactttgtttgtaacgtaacataagtctctaggctaaaatg

SEQ ID NO: 2105 - DNA, 88 bp, homo sapiens
agactcgagttttgggcagaaaccaaagaaggctagtctggagaaactactaataaaatgtacccagactggagttttgggcagaaac

SEQ ID NO: 2106 - DNA, 87 bp, homo sapiens
taagtgttcatagataggcaaattttcaggaaaatttgtttttatatcttggtgaaaaacaatctaagtgttcatagatagacaaat

SEQ ID NO: 2107 - DNA, 77 bp, homo sapiens
aacgatagatgttaagggcaagataagatgtattcttgacaatacaaaaaaacaactgatagatgttaagggcaaga

SEQ ID NO: 2108 - DNA, 105 bp, homo sapiens
cctgtaatcccagcactttgggagcctgaggctggcagatcacttaaaagtcaggagttcggccaggcgtggtggctcacgcctgtaattccagcactttgggag

SEQ ID NO: 2109 - DNA, 89 bp, homo sapiens
tagagcagcctcttttatacattctaacagttattgcttagtcatgctttcctctatgtttagagcagcctctttcatacattctaaca

SEQ ID NO: 2110 - DNA, 92 bp, homo sapiens
tcagcctcccgagtagctgggactacaggcacccgccaccatgtccggctaattttgtattcagcctctcgagtagctgggactacaggcac

SEQ ID NO: 2111 - DNA, 95 bp, homo sapiens
tatttgcttttctgttacagaattgagtttggttttgcccatctgaaatatctgtatttgcccatctgaagtatttgcttttctgttatagaatt

SEQ ID NO: 2112 - DNA, 184 bp, homo sapiens
tgagctagatacagagtgccgattggcgtatttacaaaccctaagctagacagagtgctgattggtgcatttacaaaccttgagctagatacagagtgccaattggtgcattcacaatcccttagctagacacaaagattctccaagtccccaccagattagctagacacagagcactgattgg

SEQ ID NO: 2113 - DNA, 342 bp, homo sapiens
ggcagaggtgctccttacatcccagatgatgcgggggccgggcagagccgctcctcacttcccagagggtgggcgatgggcagaggtgctcctcacttcccagatggtgggcagctgggcagaagcactcctcacttcctagacagggcagtggccaggcagaggggctcctcacttcccagtcagttgggtggccagacagaggcgctcctcactttccagacagggcggcagccagagagaggtgctcctcacttgccagatggggcagcagccaggcagaggcactcctcatttgctagatggtggggccgccgggcagaggggcatttcacttcccag

SEQ ID NO: 2114 - DNA, 79 bp, homo sapiens
atcaaaaagggcaaaagtaaagtaagtaatttgtgttttgagcttcattatgaatatcaaaaagggcaaaagtaaggta

SEQ ID NO: 2115 - DNA, 159 bp, homo sapiens
atctttgttcattatttctttgggtctctgcttaaatattttatctctctgacatctttgttcattatttctttgggtttctgcttaaatatctgcttcctccacccttctctttctgatatctttgttcattatttctttgggtctctgcttaaatat

SEQ ID NO: 2116 - DNA, 79 bp, homo sapiens
tttaattacagttcactttacatcagttaactttacatcagtatacttacagtttaattacagttgactttacatcagt

SEQ ID NO: 2117 - DNA, 79 bp, homo sapiens
aggaagagataaaagtttaaaatttgatgtatagtttctactgaatgcatgtaggaagagataaaagttcaaaatttga

SEQ ID NO: 2118 - DNA, 104 bp, homo sapiens
actagtatggctacagcacaagtcgcaggaaaggagatgagaaagagtaatgcgtgttcagggaaccagactagtatggctacagcacaagtcgcaggaaagga

SEQ ID NO: 2119 - DNA, 75 bp, homo sapiens
gttcctgccttaactgatgacattccaccacaaaagaagttaaaatggcctgttcctgccttaactgatgacatt

SEQ ID NO: 2120 - DNA, 110 bp, homo sapiens
tgtctcaatagttttaccttttctagagatcatatagttgaaatcaaaccttcccctgggaaccactgatctttttattgtctcaatagttttaccttttccagagatca

SEQ ID NO: 2121 - DNA, 96 bp, homo sapiens
tagccctatagcatagtttgaaaatagtctatgggtctatttttgtactagtaccttgctgtttcggttactatagccctatagcatagtttgaag

SEQ ID NO: 2122 - DNA, 96 bp, homo sapiens; identical to SEQ ID NO: 2121

SEQ ID NO: 2123 - DNA, 97 bp, homo sapiens
aaaaaagttggaaccatttagtaaccccctattaaaaacccctaaaatatttgtcaaatctagctacaaaaaaaagttggaaccatttagtaacccc

SEQ ID NO: 2124 - DNA, 106 bp, homo sapiens
cctccctagttcccgccattctcctgcctcaggctggagtgcagtggcacgatctcggctcactgaaagctccacctccctagttcccgccattctcctgcctcag

SEQ ID NO: 2125 - DNA, 97 bp, homo sapiens
aaaggaatataaattgttctaccataaagacacatgcacatgtttgttcatttatatacctaaaggaatataaattgttctaccataaagacacatg

SEQ ID NO: 2126 - DNA, 144 bp, homo sapiens
tcactcaccacccagtctcaaaagactcactcaccacccagtctcaagagactcactcaccacccagtctcaagagatttctttcattacaaactgcctgtctggaaggtttaagatgatcagtggcttccaagtcactaaaga

SEQ ID NO: 2127 - DNA, 115 bp, homo sapiens
gaggggatggacaggagacagtctataatcctcctgcttcacatttgtactcctagtggctcaataacccaagtcgtcagcgaggggatggacaggagacagtctatgatcctcc

SEQ ID NO: 2128 - DNA, 151 bp, homo sapiens
gtttcatctgtgtctgacttcctagcctgatgaatgggagggcagattttttactttccgatctgacctaatctttgaagaaacgttgtttctttttaatgtttcatctgtgtctgacttcctagcctgatgaatgggagggcaaattttt

SEQ ID NO: 2129 - DNA, 81 bp, homo sapiens
gtgtacgccctatgtaaatgaagaggacgaagtgaagttacgaagtcatttactcagtgtacaccctatgtaaatgaagag

SEQ ID NO: 2130 - DNA, 115 bp, homo sapiens
gctatactcatctttatcccactttagatgaggaagaaagaaagaaagaagaaagaaagaaagaaagaaagaaagaaagaaagcgctatactcatctttatcccactttagatga

SEQ ID NO: 2131 - DNA, 152 bp, homo sapiens
gaactcctgacctcaagtgatccaccctccttggcctcccaaagtgcagctaatttttgtattttagtagagacagggtttcaccgtgttggccaggctggtcttgaactcctgacctcaagtgatccacccaccttggcctcccaaagtgc

SEQ ID NO: 2132 - DNA, 102 bp, homo sapiens
ttagaaacaacaggagtctctgagcctactctgggtaaatggtggaaatacattatttactatttcagttagaaacaacaggagtctccgagcctactctgg

SEQ ID NO: 2133 - DNA, 108 bp, homo sapiens
ttattgtattaaatatatacatatgtatatgtatatataagtatgtgtatatatgtatatatttaatacaattattaaattgtattattgtattaaatgtatacatat

SEQ ID NO: 2134 - DNA, 77 bp, homo sapiens
atggccggttcctgccttaactgatgacattccactacaaaagaaatgaaaatggcctgttcctgccttaactgatg

SEQ ID NO: 2135 - DNA, 75 bp, homo sapiens
cacttaccctgcggaggggctggaaccagctaatcattttaccccaggtggcacttaccctgcggagtggctgga

SEQ ID NO: 2136 - DNA, 89 bp, homo sapiens
tcccgacctcaggtgatccacccatctcggcctcccaatccttgttggtcaggctggtctcaaattcccaacctcaggtgatccaccca

SEQ ID NO: 2137 - DNA, 91 bp, homo sapiens
cagagtgactccgtctcaaaaaaaacaaaaacaaaaaaaacaaacaaaaaaaaccaacctgggcagcagagtgactccatctcaaaaaaaa

SEQ ID NO: 2138 - DNA, 106 bp, homo sapiens
gcctgtatacatcagatatatggattgatgcagtgtactctctctcccttaatatgtgtgtgtgtgtgtgtgtgcgtgcctgtatacatcagatatatggattgat

SEQ ID NO: 2139 - DNA, 111 bp, homo sapiens
atttagccaatttatatgagcttcatatatagcatatgtgtgtgttaccttcctggtaacacaccaaatggctcatataaatttagccaatttatatgagctttatatata

SEQ ID NO: 2140 - DNA, 130 bp, homo sapiens
tttgccatctcagtttatgactttgtcttggtataatataaaatgtaccttatggctaaggtacatcataaggtacatcataatacatcctgatttgccatctcagtttatgactctgtcttggtataat

SEQ ID NO: 2141 - DNA, 92 bp, homo sapiens
tgttctctgcctgtgccaggctctccttgccctggaaataggaatggtacatttccggtacccgtgttctctgcctgtgccaggcctcctta

SEQ ID NO: 2142 - DNA, 94 bp, homo sapiens
atgagctccatgactcacttccttggctcaagatatggaagtcatggaagtgagtttcaagtcatggaaatgagctccatgactcacttctttg

SEQ ID NO: 2143 - DNA, 78 bp, homo sapiens
atacagagttctacatatagagtaaataaatggtagtgagattagtatatcatatatatagagttctacatatagagt

SEQ ID NO: 2144 - DNA, 81 bp, homo sapiens
aaaagacaaagaaggccattatacaataataaatgacatatataatatatataatcataaaagacaaagaaggtcattata

SEQ ID NO: 2145 - DNA, 146 bp, homo sapiens
gcccgggagagggtggctcctctctgcagtcaggttgttctgacatctctgcaggtctctgaagctctcagcagagagggtagctcctctctgtagctggttctctgattgtctcctgctatcagcagagagggtagctcctctct

SEQ ID NO: 2146 - DNA, 131 bp, homo sapiens
atataagttttctaaggaagcatggaattttcttttcataaattaggaagatacaagaattagtccaaagaaattgttttaaaaaatctttctgtatataacttttctaaggaagcatggaattttctttt

SEQ ID NO: 2147 - DNA, 105 bp, homo sapiens
tagacagaaatgttctccaagtcccctacccaattagctagacacagagccctgattggtacatttacaaacctttagctagacagaaaagttctccaagtcccc

SEQ ID NO: 2148 - DNA, 236 bp, homo sapiens
agctagaaacagagtgtggacacaaaggttgtccaaggccccaccagagtagctagatacagagtgtcgattgatgcagtcacaaaccctgagctagacacagggtgctgattggtgtgtttacaaaccttgagctagatacagagtggggattggtgtgtttacaatccctgagctagacataaaggttcgcctcctccccaccagattagctagatacagagtgcggattggtg

SEQ ID NO: 2149 - DNA, 105 bp, homo sapiens; identical to SEQ ID NO: 2147

SEQ ID NO: 2150 - DNA, 88 bp, homo sapiens
tatgtcacaatcatttgaatttgtcacaaatcacttgtcacaaatcatttgtcaaaaatcatatgtcacaaatcatttgaatttgtca

SEQ ID NO: 2151 - DNA, 114 bp, homo sapiens
gccagataataggacacccacatgtgagtacagtttggttgagggagatgtagcagtattgcagtggtatatggcttgggagtctgggccagataataggacacccacatgtga

SEQ ID NO: 2152 - DNA, 109 bp, homo sapiens
tgaccaaacaaatgagttaatcatttccctcacccaaaaaatgagacaatttcccattttttattttgtatggtgaccaaataaatgagttaatcatttccctcaccca

SEQ ID NO: 2153 - DNA, 91 bp, homo sapiens
tttctgtagatgatctaatgatcaactaatccccatttttttataaaaaggcaaaatatgtcactcttttctgtagattatctaatgatca

SEQ ID NO: 2154 - DNA, 113 bp, homo sapiens
actaattcttgactattttttatgaataaaacctactgctagtccagctaagattgtcacttgtccttccttgactaattcttgactatttttatgaataaaacctactgcta

SEQ ID NO: 2155 - DNA, 103 bp, homo sapiens
aaaatatatttcatatacgtaaatataatttatatatttatatatcatatcatatattttatatagaatatatattttataaatataatgtatatatttatat

SEQ ID NO: 2156 - DNA, 94 bp, homo sapiens
ctcagtaaatctacattttacatatgacaagaggaagtagagggaaaagtcaattatgcattctctcatgctcagtaaatctacagtttacata

SEQ ID NO: 2157 - DNA, 105 bp, homo sapiens
agtacccttaagagcactgaagtactcttaagagcattctagattgctcttaagaagtactcttaagaagtacttaagaagtactcttaagagcattctagaaca

SEQ ID NO: 2158 - DNA, 75 bp, homo sapiens
aatgtcatcagttaaggcaagaacaggcaattttcacttcttttgcggcggaatgtcatcagttaaggcaggaac

SEQ ID NO: 2159 - DNA, 124 bp, homo sapiens
ataaatatccatgaaatcttcacaatttatgttcagagactgcagtaaagacaggcgtaagaaattataaaagtattaatttgggaactaataaatgtccatgaaatcttcacaatttatgttc

SEQ ID NO: 2160 - DNA, 73 bp, homo sapiens
agataactactgtgattactttttctggaccaggagtggccagactgtgtagataactactgtgattactttt

SEQ ID NO: 2161 - DNA, 108 bp, homo sapiens
caccaatcggcactctgtatctagctcaaggtctgtaaacacaccaatcagcaccctgtgtctagctcagggtttgtgaatgcaccaatcgacactctgtatctagct

SEQ ID NO: 2162 - DNA, 101 bp, homo sapiens
ggttgcatagcttgttcaaagtcgtcaaactagtcagagaggctagtttgatgcaacaaactatgcaacaaacagaacggttgcatagcttgttcaaggtc

SEQ ID NO: 2163 - DNA, 107 bp, homo sapiens
tttaagcttagtcttaaattgaaatatttgggataaaatatatataaatatatagtgacttggagatcatttaagcttagtcttaaattgaaagatttgggataaaa

SEQ ID NO: 2164 - DNA, 155 bp, homo sapiens
tatgtttcaggaaacaaaaagcctagtgcatctggaaggcagaaagcaagggaaatgctgggtgaatgaaggcaggagaaataagtcaaagcaaaaaaagagtatgtttcaggaaacaaaaagcctagcgcatctggaaggcagaaagcaaggga

SEQ ID NO: 2165 - DNA, 76 bp, homo sapiens
ccccactcctcggagaaggagggtaaaacacgaaggctctgcacttccgttcccccactcctcggagaaggagggt

SEQ ID NO: 2166 - DNA, 90 bp, homo sapiens
tctcatctcattgagttcttgaaagattctctgttttctcatctatgaaatgggcataatgttctcatctcattgagttcttgaaagatt

SEQ ID NO: 2167 - DNA, 154 bp, homo sapiens
gcgtgtgtggataagtagggggagtgtatgcctgggcgtagatgtgtgatgcgcgtgtgtggataagttgggggagtgtgtgatgcgcgtgtgtggataagttgggggagtgtatgcctgggtgtaggtgtgtgggtgtatgttgggtgtgtgt

SEQ ID NO: 2168 - DNA, 108 bp, homo sapiens
gacagacagacggacggacggaaggaaggaaggaaggaaggaaggaagggagggagggagggagggaggagaggggaggcgggggaggaaggaaagaaggaatgaagg

SEQ ID NO: 2169 - DNA, 95 bp, homo sapiens
tccagtgacaaacagacaagaggtgaaaactaacagacaggtcctagaaaggactctgcatggatccagtgacacacagacaagaggtgaaaact

SEQ ID NO: 2170 - DNA, 74 bp, homo sapiens
ggaggttgcagtgacccgagacttgcgccactgcgcttgaaccggggaggcggaggttgcagtgacccgagacg

SEQ ID NO: 2171 - DNA, 104 bp, homo sapiens
aggtgcttatacactagacttcaaggtgttagactgtaagcatttttgggcgcagggactgtgtcttatagagcaggtgcttatactctagacttcaaggtgtt

SEQ ID NO: 2172 - DNA, 82 bp, homo sapiens
cggggcttcaccctcgctgcctcccagctgcccccgtcgccccacacttaccctcggggcatcaccctcgctgcctcccagc

SEQ ID NO: 2173 - DNA, 109 bp, homo sapiens
gtggctcacacctgcaatcccagcactacagtctgggcacggtggctcacacctgtaatcccagcactacaggccaggcatggtggctcacacctgtaatcccagcact

SEQ ID NO: 2174 - DNA, 174 bp, homo sapiens
atgcacacacgcagctcccagccccgggtggtgggaatagttggatgaagcagtgcacacacacacgtatgcacacacgcagctcccagccccgggtggtaggaacagctgaagcagtgcgcgcatgcacacacacacacccatgcacacacgcagctcccagccccaggtggt

SEQ ID NO: 2175 - DNA, 126 bp, homo sapiens
tcaatatacaataaacaataaacaattatttagtataaataattgtttagataaacaataaacaattatttagtataaataaacgattatttataaacaataaacaataacaattatttagtataa

SEQ ID NO: 2176 - DNA, 93 bp, homo sapiens
atcttctaaaaaagatggacgatctatcatcatcgttatattagtgctgttgatactatatcttctaaaaaagatggacgatctagcatcatc

SEQ ID NO: 2177 - DNA, 107 bp, homo sapiens
cagggcagagggcagggccgtgctgggcactgtgggctgtggatggtgctggcatttaagaggggagaccatagaccagggcagagggcagggccgtgctgggcact

SEQ ID NO: 2178 - DNA, 122 bp, homo sapiens
cgggaacagcacggggcactgggagctgcaaacgcccacgatactgtgagagacggagaaaggtatgacaggaggagcagaccaagaagacgggaacagcacggcgcactgggagctgcaaa

SEQ ID NO: 2179 - DNA, 94 bp, homo sapiens
gggggttgcagcttgttccacacaagcacagcgtcttgggaacagccagccgagggtgtggtagggggttgcagcttgttccacacaagcacag

SEQ ID NO: 2180 - DNA, 93 bp, homo sapiens
gtattgtgtattgtacagaatggtgtgtgctgtgctatccaggaacacatttattatcattatcaagtattgtgtactgtacagaatggtgtg

SEQ ID NO: 2181 - DNA, 84 bp, homo sapiens
gaattagtgctggcaacagacagaaagtggcatccctttgatgcccttggaccctttgaattagtgctggcaacagacgaaagc

SEQ ID NO: 2182 - DNA, 76 bp, homo sapiens
agggctgaggttcctcactgcagtcaggtgcggcacttgtccaggaggactcagggtgaggttcctcactgcagtc

SEQ ID NO: 2183 - DNA, 91 bp, homo sapiens
ggtcacagactggtgactggcattggtcctgggtgtctgcgtaggtcccgggggcgtgggtctagtggtcagagactggtgactggcattg

SEQ ID NO: 2184 - DNA, 85 bp, homo sapiens
cccctagtggacagtgtgggaagttctgggagtgtttcaacgaggacagtgatgtcccctagtggacagtgtgggaagctctggg

SEQ ID NO: 2185 - DNA, 91 bp, homo sapiens
aggcagaagccagggccacactcgtgctccagaagctcagacaggtctgggagggagtgaggccgaggcggaagccagggccacactcgtg

SEQ ID NO: 2186 - DNA, 120 bp, homo sapiens
tttgcagctcccagtgcgccgtgctgttcccgtcttcttggtctgctcctcctgtcatacctttctccgtctctcacagtatcgtgggcgtttgcagctcccagtgccccgtgctgttcc

SEQ ID NO: 2187 - DNA, 79 bp, homo sapiens
aattatgtgacattttggaaaaggaaaaactacatagagagtaaaatatctatgtaattacgtgacattttggaaaagg

SEQ ID NO: 2188 - DNA, 105 bp, homo sapiens
tgctgggattacaggtgtgagccaccgcgcccggccctgtttttgtttttaagtagagatggacctcggcctcgcaaaatgctgggattacagttgtgagccacc

SEQ ID NO: 2189 - DNA, 106 bp, homo sapiens
gtactcgctgttgatagtcctgttgtatgtgtagcttttgctggaaggtcctggcggtctggacacgtactcgctgttgacagtcctgttgtatgtgtagcttttg

SEQ ID NO: 2190 - DNA, 110 bp, homo sapiens
tgggaatcatctcacagcacccacatattcgcggaattcatgcccctttcctcctcttaacccagtggcctttggaatagtggctgggaatcatctcacggcacccacat

SEQ ID NO: 2191 - DNA, 90 bp, homo sapiens
gaacagaatatccccttttccctgcccgcacccttgacctctgcacctttgcacgtcggttccctcgaacagaatatccccttttccctg

SEQ ID NO: 2192 - DNA, 96 bp, homo sapiens
agctcctatctgcaggcaggtcatcctgacgtctctgcagccctcagtggagaggagacctggagtgggaagctcctatccgcaggcaggtcatcc

SEQ ID NO: 2193 - DNA, 74 bp, homo sapiens
ttgtatttttggtagagacaggctgatctcgaatgcctgacctcagaagtattgtatttttggtagagacagga

SEQ ID NO: 2194 - DNA, 108 bp, homo sapiens
agctagatacagagtgtcgattggtgcactcacaaaccctgagctagacacagggtgctgattggtgtgtttacaaaccttgagctagatacagagtgtggattggtg

SEQ ID NO: 2195 - DNA, 74 bp, homo sapiens
caagactccatctcaaaaaaataagattaaaaaaaaaaggataaattttacaagactccatctcaaaaaaaaaa

SEQ ID NO: 2196 - DNA, 81 bp, homo sapiens
caccaaggctgagccctttccctcggccctgcagtgtctcccctctgtggtcgtcagacaccaaggctgagccttttccct

SEQ ID NO: 2197 - DNA, 96 bp, homo sapiens
gagcccatgatcttaactgctgcttatatcatgtctgttgaacgagtctaacttgagcagacttgcttcggagcccatgatcttaactgctgctta

SEQ ID NO: 2198 - DNA, 115 bp, homo sapiens
gatggtggcaattgcattttaaaaccaactaatattagaagtcataaattcagatgtctcagctggaagggaaggcaccgatggtggcaattgcattttaaaaccaactaatatt

SEQ ID NO: 2199 - DNA, 82 bp, homo sapiens
cctacagagccagagaacttaggggtcaatggtaggctcttagtgtgcatctatttaccctacagagccaaagaacttaggg

SEQ ID NO: 2200 - DNA, 120 bp, homo sapiens
ccgtgctgttcccgtcttcttggtccgctccacctgtcatacctttctccgtctctcacagtatcgtgggcgtttgcagctcccagtgccccgtgctgttcccggcttcttggtccgctc

SEQ ID NO: 2201 - DNA, 103 bp, homo sapiens
caagcaccttccccaggccaggccaggcctcaacacccccaagcaccttccccaggccaggccaggcctcaacacccccaagcaccttccccaggccaggcca

SEQ ID NO: 2202 - DNA, 96 bp, homo sapiens
ggcagcacaccaaaatcagcattatcaaaaggacttcaccatcaacacacattaacggggggaggggggcagcacactaaaatcagcattatcaaa

SEQ ID NO: 2203 - DNA, 126 bp, homo sapiens
ggtgagatgggcagtgagtcaggaatgggcaggagctgcaggaggaaagcacagttggggtaagctcgtgtcagtgtgctgcccgtcatctggtgagatgggcagtgagtcagggatgggcaggag

SEQ ID NO: 2204 - DNA, 219 bp, homo sapiens
accccgtctgtcatgttctctgcagtatccccagcctctagcacagtgtcttgagtttcttaagggcagcagctatgcctgccaccccgtctgtcatgttctctgcggtatccccagcctctagcacagtgtcttgagtttcttaagggcagcagctatgcctgcaaccccgtctgtcatgttctctgcggtatccccagcctctagcacagtgtcttg

SEQ ID NO: 2205 - DNA, 133 bp, homo sapiens
ttctcttgagttccagagccgcgattccccatcacctgtgggtcccctgagcacctcacatattttaaatatctctggctctctgattctcttgagttccagagccacgattccccatcacctgtgggtcccc

SEQ ID NO: 2206 - DNA, 94 bp, homo sapiens
ttgacctggtgtcctgtgatgttttaaattagtcatcagtagtatatagaaatacaactgatctttacatattgacttggtgtcctgtgatgtt

SEQ ID NO: 2207 - DNA, 91 bp, homo sapiens
tacttagtgattcattcacatacacaatcatcacccctggcatacttaggccagagagtatagatacttgtgattcattcacatacacaat

SEQ ID NO: 2208 - DNA, 126 bp, homo sapiens
tttaggatcctgctgattggtgcattttacagagtgctgattggtgcattttacaatccccttgctagctacagagcactgattggtgcgtttttacagagtgctgattggtacattttacaatcc

SEQ ID NO: 2209 - DNA, 124 bp, homo sapiens
ttggggaagtgataaatgtccatgaaatcttcaaaatttatgtttacagactgcagtaaagacgggcataagaaattataaaagtattaatttggggaagtaataaatgtccatgaaatcttca

SEQ ID NO: 2210 - DNA, 98 bp, homo sapiens
gactctggagcccaggctgttgcttcccagtctagtggtgaatcctccacaggctggtgagtgtagtgtctgactctggagcccaggctattgcttcc

SEQ ID NO: 2211 - DNA, 109 bp, homo sapiens
gttcagtctctgttgagcgtgcattgtcgaggggtgtcaccatgaaacggggcagccactgtagctacctccattgttcagtctctgttgagcgtgcattgttgagggg

SEQ ID NO: 2212 - DNA, 78 bp, homo sapiens
tgagtgtgggccttcccaggccacagtacgtggggtgagtgcccctgggcgtctctgtgtgtgggccttcccaggcca

SEQ ID NO: 2213 - DNA, 100 bp, homo sapiens
agggtggtgcccactcagggtgtgtgagctgggccaggggaagggaaagtgggcatctgctggagggcttcagggtggtgcccactcagggtgtgtgagc

SEQ ID NO: 2214 - DNA, 121 bp, homo sapiens
gctcggtcccacctccccaggtgcgggttgctggctgggcccaggccccaggcgctcggtcccacctccccaggcgctcggtcccacctccccaggtgcaggttgctggctgggcccaggc

SEQ ID NO: 2215 - DNA, 94 bp, homo sapiens
agtgaatctccgtgcatggcagacatgttgtgagaggcagaggctggggccgcagagctgtgaggagacagtgaatctccgtgcacggcagaca

SEQ ID NO: 2216 - DNA, 110 bp, homo sapiens
gggcaggcgagtggggccacctgtgcccgttcccattctacagccaacagagacgaagctgtgcgcacagcaggacgacgcacggggcaggcgagtggggccacgtgtgc

SEQ ID NO: 2217 - DNA, 89 bp, homo sapiens
cgtgtcagggatgggggagacagcccagcacggactgcatggacgcacgggaggggccgggagcggcgtgtcagggatgggagagacag

SEQ ID NO: 2218 - DNA, 97 bp, homo sapiens
ggcggggcggggcctgctaagggtcgcagccgtgccccgtcgatgagcggggctgggggcgggccctgtgatcgggcggggcggggcctgctaaggg

SEQ ID NO: 2219 - DNA, 97 bp, homo sapiens
ggcaggtgatgtggtttggctgtgtccccactcaaatctcatcttgaactgtggacgtggtgcttggatgggcaggtgatgtggtttggctgtgtcc

SEQ ID NO: 2220 - DNA, 104 bp, homo sapiens
cttcagactcgcagggatggggccacatggtccagtggttctcctggccccctccccctccctcatcttcagactcgaagggatggggccacatggtccagtgg

SEQ ID NO: 2221 - DNA, 105 bp, homo sapiens
accagacgcagtgtggacggggtgacccctggtgcaccagatgcagtgtggacggggtgaaccctggtgtaccacacttgaccagacgtagtgtggacggggtga

SEQ ID NO: 2222 - DNA, 127 bp, homo sapiens
ctggaaagttctatctccagaagataccctgagaacacttaggccctcccagaccacatgaagaaccaacgtcataaggatccaaggcatccctggaaagttccttctccagaagaaggatccaagg

SEQ ID NO: 2223 - DNA, 122 bp, homo sapiens
tttggagtgcctctgagtggcttccgtctggggacagatgttccgtcttcagaaaatactcaacgctggtttgaatatgtgtgctgtgcgtttggagtgcctctgtgtggcttccgtctggg

SEQ ID NO: 2224 - DNA, 101 bp, homo sapiens
atgtatagatgatggaagaatgatggattgattgataggtagatgaatggatagatggatgatgatttggtagattatgtatagatgatggatgaatgatg

SEQ ID NO: 2225 - DNA, 80 bp, homo sapiens
gccccacctgcagagggggaggcaatgacccccttcgtccccggcggggaggcgggcgccccacctgcagagggggaggc

SEQ ID NO: 2226 - DNA, 176 bp, homo sapiens
gtggctcactcctgtaatcctagcacctcgggaggctgaggctggcagactgcctgggctcaggagttccagaccagccagggcaacatggtgaaacccagcgtctaccaaaatacaaaaacttggctaggcgtggcagcgcgtgtctgtaatcccagctactagggaggctgagg

SEQ ID NO: 2227 - DNA, 262 bp, homo sapiens
gtggctcacacctgtaatcccagcactttgggaggccgaggtaggtagatcacctgaggtcaagagttcaagaccaggccgggcgcagtggctcacgcctgtaatcccagcactttgggaggccgaggcgggtggatcatgaggtcaggagatcgagaccatcctggctaacaaggtgaaaccccgtctctactaaaaatacaaaaaattagccgggcgcggtggcgggcgcctgtagtcccagctactggggaggctgagg

SEQ ID NO: 2228 - DNA, 83 bp, homo sapiens
acaaagacagagccggctcaccagcacactcctgccagcaccgggacccactgcgaacaaagacagagccggctccccagcac

SEQ ID NO: 2229 - DNA, 133 bp, homo sapiens
cccaggacccggcaccccctcaacccccaggacctgatgctcccccaacccctcaggagccggggccccctcacccccaggacccggcaccccctcaactcccaggacctggtgctcccccaacccctcagga

SEQ ID NO: 2230 - DNA, 107 bp, homo sapiens
gcctcacttccgagacccagcctggcagatggtggcagttcagaggcaggaaggagcctcaggtgggcctcacttccgagacccagcctggcagatggtggcagttc

SEQ ID NO: 2231 - DNA, 123 bp, homo sapiens
ggcctcccaaagtgctgggattacaggcgtgagctaccgtgcccggcctggtctcaaactcttgacctcaagtgatcctctcccgccttggcctcccaaagtgccgggattacaggcgtgagc

SEQ ID NO: 2232 - DNA, 97 bp, homo sapiens
ccccaggtaggcagacagagctcagagccctcgcaggccagccactctgtaggaaggccaggaggaccccaggtgggcagacagagctcagagccct

SEQ ID NO: 2233 - DNA, 136 bp, homo sapiens
ggtgcacctacactcccagatgcagacttcctggtgcacctgtacttccagatgagactttctggtgcacctgcacttccacatgagacttccgggtgcacctgcactcccagatgcagacttcctggtgcacctg

SEQ ID NO: 2234 - DNA, 118 bp, homo sapiens
cccttcagatgctggtcccacctggagtgacgtgagaacccacagtgaggactcagtcccgcaagatggccccgcccttcagatgctggtcccacctggagtgacgtgagagcccaca

SEQ ID NO: 2235 - DNA, 103 bp, homo sapiens
tactccccgcatcgcggggggcgcctcgcccccctgcgatttagatcgtaatatccggggaggagaggcgggtgctactactccccgcattgcggggggcgcc

SEQ ID NO: 2236 - DNA, 75 bp, homo sapiens
gttcctgccttaactgacgacattccaccacaaaagaagtgaaaatggtctgttcctgccttaactgatgacatt

SEQ ID NO: 2237 - DNA, 75 bp, homo sapiens; identical to SEQ ID NO: 1792

SEQ ID NO: 2238 - DNA, 103 bp, homo sapiens
ggggctggctcttactccccgtacgttggggtggggcctcacccccctgcgatggggctcctaagagccagggggggagtggggctggctcttactccccgta

SEQ ID NO: 2239 - DNA, 117 bp, homo sapiens
ggtgcctcacccccgtgcgatgggggtcctaagagccagggggggaggcggctagctctaactcccctcatcgcgggaggtgcctcacccccctgcgatgggggtcctaagagccag

SEQ ID NO: 2240 - DNA, 102 bp, homo sapiens
ggtgtacaccatgtgtgtacacctgctctgatattattcgtaatatcctaggggaatgttactcctgatgacacaggtggtgtacaccatgtgtgtacccct

SEQ ID NO: 2241 - DNA, 126 bp, homo sapiens
aatggaagacagcaaacattgcctaaaacaaaaatgtaaatactacaaacttacaaaaagccgtcatgtagaaattcagtcactccaatggaagacagcaaacattgcctaaaacaaaaaagtaaa

SEQ ID NO: 2242 - DNA, 143 bp, homo sapiens
gctgattggtgcgtttacaaacctttagctagacacagagtgctgattggtgcgtttttacagagtgctgattggtgcgtttttactgagcgctgattggtgcgtttacaaacctttagctagacacagagcgctgattggtg

SEQ ID NO: 2243 - DNA, 88 bp, homo sapiens
gcaataacttttgcaccaacctatacaattcatccattgaaagttaactttcaatggcaaaaactgcaataacttttgcagcaaccta

SEQ ID NO: 2244 - DNA, 85 bp, homo sapiens
atgaatgaatgaatgagtggcaggcaaaacaaggcagagcctgcatatttatgaacgaatgaatgaatgaatgagtggcaggtaa

SEQ ID NO: 2245 - DNA, 99 bp, homo sapiens
cacatgggatattggaggttagagcttcaacataagaatttgattacttaattacctccaaatacagtcacatgggatattggaggttagggcttcaac

SEQ ID NO: 2246 - DNA, 86 bp, homo sapiens
gctagacatgctcacaggcatgtagaacattctatgtccttgtactttaaccaagatgtccaagctggacatgctcacaggcatgt

SEQ ID NO: 2247 - DNA, 88 bp, homo sapiens
accatggccttctccttcctggcatgggcctggcagacaaggtgtgctctggcgttgggggtcccaccatggccttctccttcctggc

SEQ ID NO: 2248 - DNA, 146 bp, homo sapiens
aaccaatctttccctgataatgtattaaaagtaaatggtaatgaagccccctccccaccaccaataaggctttccttccccagctgagagtcataattaaaccaatctttccctgctaatgtattaaaagtaaatggtaatgaagc

SEQ ID NO: 2249 - DNA, 108 bp, homo sapiens
aacacttccgtttcttccatgagcctgtccttctcatctgtggaaggctcagtctgtgtagacatgcatgcacacactcataacacttccgtttcctccatgagcctg

SEQ ID NO: 2250 - DNA, 132 bp, homo sapiens
ctgcgtgaaaccacacgagaggctcaggtggtgtcatcactccgagccacgggtggtggaagctgcacccccacactgtcctctgcgtgaaaccacacgagaggctcaggaggtgtcatcactccgagccac

SEQ ID NO: 2251 - DNA, 101 bp, homo sapiens
ccctggacctagcccagtgggtggaggtcaggtcgggcaggagggtaggtcacccaggggcgcccccgccaagccaagccccggacctagcccagtgggtg

SEQ ID NO: 2252 - DNA, 130 bp, homo sapiens
gggtctggcatactcactcatgggatttacatgctgctcaaaaaggggggcagccctgtgtccagacacagggagcgtctgagggggtctggcatactcactcatgggatttatatgctgctcaaaaagg

SEQ ID NO: 2253 - DNA, 151 bp, homo sapiens
aaaacattcctaaaaatgtaactattgactcccgcgcactgatgcgagcctactcaagccagggctgatttccatgctacccacagtttaacaactggctcaaaaaattcctaaaaatgtaactattgactcccgcgcactgatgcgagcc

SEQ ID NO: 2254 - DNA, 83 bp, homo sapiens
gatcgccctccgctggaacacccacttccctgggcagctgccccgccgcatttggatcgtcctccgctggaacacccacttcc

SEQ ID NO: 2255 - DNA, 87 bp, homo sapiens
agcagacacagagatgagcaagacatgtgtcccctccacaagcccccagccaggtgctggacatagcagacagagagatgagcaaga

SEQ ID NO: 2256 - DNA, 79 bp, homo sapiens
ccacctcctccaggaagccttcctgtctctcctctgggtttccatggtgtctgtgccacctcctccaggaagccttcct

SEQ ID NO: 2257 - DNA, 95 bp, homo sapiens
gatgtcagtgtgccggctggagaaataaccacagaaagcaccagtgtgccggctggagaaataaccacagaaagcaccagtgtgccggctggaga

SEQ ID NO: 2258 - DNA, 104 bp, homo sapiens
gggagcaatgggagtggactgagtgccgtggtagaggaagagaggctagaaaccagggacaggtgccagggcaggcctagggagcaatgggagtggactgagtg

SEQ ID NO: 2259 - DNA, 143 bp, homo sapiens
atctagtttttgggagtatacctttagacttgtcatggagaaacaccaccgtactctgaataatctatttcatgtttaaaaagtccttattatcatcatctagtttttgggagtatacctttagacttgtcatggagaaacac

SEQ ID NO: 2260 - DNA, 89 bp, homo sapiens
tgtaaacccagttaatgtccagcaacgccaataacgaaccagaaagtggcagagtgttcacatgtttgtaaacccagttaatgtccagc

SEQ ID NO: 2261 - DNA, 81 bp, homo sapiens
agactgagccactgcccctcagctgcatccacgcccctccaactccctccccagcagcagactgagccaccgcccctcagc

SEQ ID NO: 2262 - DNA, 94 bp, homo sapiens
caaggtcacacagcaagggacgggctgagattgaatcatgggtggactagcgcccgcatgcagtgcccaaggtcacacagcaagtgacgggctg

SEQ ID NO: 2263 - DNA, 96 bp, homo sapiens
tgcctcaggggagagcggatcacaaatcccaaacccacccactcactcacagatgggccatgctctgcctcaggggagagcggatcacaaacccac

SEQ ID NO: 2264 - DNA, 115 bp, homo sapiens
cccatcttcccagggtggcatttctagtcggcatcggagtgacgttcactgctctttaacgagctactgaggacgtggctgctgcccccaccttcccagggtggcatttctagtc

SEQ ID NO: 2265 - DNA, 82 bp, homo sapiens
ggcccagtgtgtctcagcctcagagctggcagggcagggcaggcatcccctctgcactggcccagtgtgtctcagcctcaga

SEQ ID NO: 2266 - DNA, 82 bp, homo sapiens
cccgtgttccaccaagcatgacaccataaaacactggcgaacgatcagggccaggccccgtgttccaccaggcatgacacca

SEQ ID NO: 2267 - DNA, 108 bp, homo sapiens
accagcatcactataccccctcccagtgccctaccccgaccaggcagccccagaccccacaccaatctcactccctcaccaccagcatcaccataccccctcccagtg

SEQ ID NO: 2268 - DNA, 111 bp, homo sapiens
atctgttgtttctaaaatgtgtcacaaaatgtccagatgtccccctaaaatgtgtcacaaaatgtcacagatgtccccctacatctgttgtttctaaaatatgtcacaaaa

SEQ ID NO: 2269 - DNA, 102 bp, homo sapiens
tatggggagtaagagccagccccactcccccccggctcttaggagccccttcgcagggggatgaggccccaccccgaggtacggggagtaagagccagcccc

SEQ ID NO: 2270 - DNA, 75 bp, homo sapiens
aactcctgacctcaggtgatctgcccgcctcagcttcccaaagtgctggaaactcctgacctcaggtgatccgcc

SEQ ID NO: 2271 - DNA, 88 bp, homo sapiens
tctctattttgtgagatatcattctcatgtttttttaaaaaaattgtctcttattgatattctctatttttgtgagatatcattctca

SEQ ID NO: 2272 - DNA, 105 bp, homo sapiens
cgatgcggggagtaagagccagcccttcttgcccccctggctcttaggacccccatcgcaggggggtgaggcaccccccgcgatgcggggagtaagagccatccc

SEQ ID NO: 2273 - DNA, 140 bp, homo sapiens
aaaagcagaactactagtaagggtctaacaaagatcacatgcttctgagggaacaggacaaaggcaaaagcagaactactaataagggtccagcaaagatcacaaagcaaaagccaaaagcagaaccactgataagggtc

SEQ ID NO: 2274 - DNA, 75 bp, homo sapiens
gcctcagcttcccaaagtgctgggaactcctgacctcaggtgatccgcctgcctcagcttcccaaagtgttggga

SEQ ID NO: 2275 - DNA, 95 bp, homo sapiens
gcaagtcccgcttttctgggggaaggggcaagaacccctcaaccccttctccttcacccttagcagcaagtcccgcttttctgggggaggggcag

SEQ ID NO: 2276 - DNA, 102 bp, homo sapiens
aggggtacacacatggtgtacaccgcctgtgtcatcaggagtaacattcccctaggatattacgaataataccacagcaggtgtacacacatggtgtacacc

SEQ ID NO: 2277 - DNA, 117 bp, homo sapiens
catcgcaggggggtgaggcaccccccgcgacgcggggagtaagagccagcccctcttgccccccctgcctcttaggacccccatcgcaggggggtgaggcaccccccgcgatgcggg

SEQ ID NO: 2278 - DNA, 307 bp, homo sapiens
acagagcactgattggtgcatttacaaaccttgagctagaccacagggtgctgattggtgtatttataatcccttagctagacataaaggttctccaagtccccactagataagctagatacagagtgctgattggtgcatttacaaaccttgagctagacgcagaatgctgattggtgtatttacaaaccttgagctagacacagagtgctgattggtgtatttacaatcccttagctagacataaaggttctccaagtccccaccagattagctagatacagagtgctgattggtgtgtttacaa

SEQ ID NO: 2279 - DNA, 105 bp, homo sapiens
gcccggctaattttttgtattttttttttctttgagacggagtctcgctctgtcgcccaggccggagtgcagtggcgcatgcccggctaattttttgtatttttt

SEQ ID NO: 2280 - DNA, 129 bp, homo sapiens
tttaaaaagtcaaaggggaaaagagaatacagaaaaaatcaatggacttgcattacttttaattaatttaaaagatactacgtatgtttaaaaagtcaaaggggaaaagagaatacataaaaaatcaat

SEQ ID NO: 2281 - DNA, 137 bp, homo sapiens
ctctctatccttatttcccttctcttctgtttcattttcttctttcttagagtgtggctgagattcttccaccctctctaaacttcctgctctctattcttatttcccttctcttctgtttcattttcttctttctt

SEQ ID NO: 2282 - DNA, 86 bp, homo sapiens
ttaacaaatttaacaatggagacaactggataatttaattggacaaaaaaagttagccaggttaacaaatttaacaatggagacaa

SEQ ID NO: 2283 - DNA, 77 bp, homo sapiens
gtttttaaagcatgaagctttgaacaaatttgagctctattcaatatgtgtgtgtgtttaaagcatgaagctttgaa

SEQ ID NO: 2284 - DNA, 94 bp, homo sapiens
tttccttcctgtttaagtctctccaaatcataatatgaccttcccgtttaagtcctctctaaatcataatatttccttcctgtttaagtctctc

SEQ ID NO: 2285 - DNA, 82 bp, homo sapiens
tgctcatagaagcatcctgtgcaatttttagtagccaagcataataaaagattaaatcatgctcatagaagcatcctgtgca

SEQ ID NO: 2286 - DNA, 80 bp, homo sapiens
ttcaataaatttaatgaagggaaatgctgctaatacaatgttgctattgttgttttcaataaatttaatgaagggaaatg

SEQ ID NO: 2287 - DNA, 89 bp, homo sapiens
catattaatttatgtaaattaatatggttatacaaaactagtataaaacatgaaactactataaaacatattagtttatgtaaattaat

SEQ ID NO: 2288 - DNA, 114 bp, homo sapiens
atatgtatgccataattaggtaaaacaatgaatgttcagttacgttcaattgttcacttatggtcagaatgttcaattgacatatgtatgccataattaggtaaaataatgaat

SEQ ID NO: 2289 - DNA, 95 bp, homo sapiens
tattatatatatgacagtagttttctggtagcatcgttttttatatatatatatataatatatatataatgtaatatatatatgacagtagtttt

SEQ ID NO: 2290 - DNA, 144 bp, homo sapiens
cctaaggttctgtggaagtttgaatgtcagagtgataattcagggtatctgacagaaaaaaaaaagggggggttagaaaagcattcaagacctaaggttctgtggaagtttgaatgtcagagtgataatttagggtatctgaca

SEQ ID NO: 2291 - DNA, 101 bp, homo sapiens
atcagaggctgaagtgaagttacaaagttattccctatgcaaacgtctgattggctgctgaaagtgaccaatcagaggctgaagtaaagttacaaagttat

SEQ ID NO: 2292 - DNA, 110 bp, homo sapiens
tttattattactagatactcgatacatgacactcgatactagacactagatagatactcgatacatgtatcgagtatctatactagacactagatagacactagatagat

SEQ ID NO: 2293 - DNA, 83 bp, homo sapiens
tgggaaagtttggaacttcctagagacttagagggctcagaagacaggatgatgtgggaaagtttggaacttcctagacactt

SEQ ID NO: 2294 - DNA, 77 bp, homo sapiens
taaagtgacccgtgtattctctcttgagctctgggtgaagtaccaaaggagagaaaatgaattccttttcttttcct

SEQ ID NO: 2295 - DNA, 148 bp, homo sapiens
taaagttactcattttctttccctgtaaagttactcattttctttccctgtaaagttactcattttcttccccttaaagttactcattttctttccctgtaaagttactcattttctttccctgtaaagttactcattttcttcccct

SEQ ID NO: 2296 - DNA, 216 bp, homo sapiens
caccaatcggcactctgtatctagctcaaggtttgtaaacacaccaatcagcaccctgtgtttagctcaaggtttgtgaatgcaccaatcgacactctgtatctagctcaccaatcggcactctgtatctagctcaaggtttgtaaacacaccaatcagcaccctgtgtttagctcaaggtttgtgaatgcaccaatcgacactctgtatctagct

SEQ ID NO: 2297 - DNA, 200 bp, homo sapiens
tttgaattcttatgcaaaaatctcagacatccaatcaaattctcaattaagtgtgaaggtagaataatgacattttgaattcttatgcaaaaaatctcagtttgaattcttatgcaaaaatctcagacatccaatcaaattctcaattaagtgtgaaggtagaataatgacattttgaattcttatgcaaaaaatctcag

SEQ ID NO: 2298 - DNA, 170 bp, homo sapiens
atttgggctggctccacatttttgtgggcaaaatgggcatttgggcatttgggcaagtaggcatttgggctggttccacatttttatttgggctggctccacatttttgtgggcaaaatgggcatttgggcatttgggcaagtaggcatttgggctggttccacattttt

SEQ ID NO: 2299 - DNA, 86 bp, homo sapiens
catgtgcctgaccactctctttcttcctataggaataaatgaaaccaagcttggggtgcatgtgcctggccactctctttcttcct

SEQ ID NO: 2300 - DNA, 118 bp, homo sapiens
gcaaggaaggaaggaagggagggagggagggagggaaggagggagggagggagggaaaagaatagtatcaaagctatttattgcaggattacttataaaggaaggaaggaaggaaggg

SEQ ID NO: 2301 - DNA, 87 bp, homo sapiens
actgtctgtagttcccagtggggtgaggaacgttaaaaactcctggatactacagacactccccactgtctgtagtttccagtgggg

SEQ ID NO: 2302 - DNA, 94 bp, homo sapiens
tcccgagtagctgggattacaggtgcctgctaccactcctggctaattttttttgtatttttagtcccgagtagctgggattacaggtgtctgc

SEQ ID NO: 2303 - DNA, 75 bp, homo sapiens
acatcctgctgattggtccattttacagagagctgattggtctgtttcacagagagctgattggtccgttttgac

SEQ ID NO: 2304 - DNA, 117 bp, homo sapiens
tctactaaaaatacaaaaattagccaggcatggtggtatgtgcctgtaatcccagctactcaggaggctgaggcaggagaaacccccatctactaaaaatacaaaaattaaccaggc

SEQ ID NO: 2305 - DNA, 97 bp, homo sapiens
tgtagaatttttagtagcatccctacatttgggaccagataattctttgttttggggggctgtgctagacattgtagaatttttagtagaatcccta

SEQ ID NO: 2306 - DNA, 93 bp, homo sapiens
caaaattaagtattctcttctttaaagtgtcaccccctctgtgaatcctttcttttcatgtgcccagtggcaaaattaagcattctcttcttt

SEQ ID NO: 2307 - DNA, 85 bp, homo sapiens
tcccctggagaatccagaaagaacacagcgcagccaacaaatcaagacacagattatcccctggagaatccagaaagaacacagc

SEQ ID NO: 2308 - DNA, 130 bp, homo sapiens
gggaagtgataaatgtccatgaaatcttcacaatttatgttcagagattgcagtaaagacaggcataagaaattatgaaactattaattttgggaactgataaatgtccatgaaatcttcacaatttatg

SEQ ID NO: 2309 - DNA, 124 bp, homo sapiens
taaatgtccatgaaatcttcacaatttatgttcagagattgcagtaaagacaggcgtaagaaattataaaagtattaatttggggaacaaataaatgtccatgaaatcttcacaatttatgttc

SEQ ID NO: 2310 - DNA, 76 bp, homo sapiens
gatgaaaaagtttgatgtcctacacttgatcttagccaaaaggtgaagaagtgatgaaaaagtttgatgtcctata

SEQ ID NO: 2311 - DNA, 95 bp, homo sapiens
tgttttccataaggattatactaatttacaaccccacaaacagtaggaaatgtaaatctccatactgttttccataaagattatactaatttaca

SEQ ID NO: 2312 - DNA, 77 bp, homo sapiens
aaagtttgaaacttcctagagacttagagggctcagaagacaggaagatatggaaaagtttggaacttcctagagac

SEQ ID NO: 2313 - DNA, 628 bp, homo sapiens
cgggataatattattctcaatatcgcagggagtgtacaaccccctgtgagattgtccttaatattcaaagacagaggagatgatattactcccaatatcgcagaaaatgtacaccccctagtgatattgttcccatgatccaggagagaaaaggatgatattattttcaatatcacagaacgtgtacacgcacccagtgatattgttcctaatttcaaggtgggagaggatgatatgacacctgatatcgcagagagcaaaaacacacctgtgatattgttctgaatatcaagggtggggagaggacgatattactgccaatactgcagagggcgtacacctgtctggaaatagttcataatttcaagaggggaagatgagattgctcacaatttcgtaaacaagctgtcggtccaccgtggatcgcaatatccaagggaagagaggggggtgatattactccccatatcgtggggagtgcccacccccctgcgatgtggattgccatatccagggggcaagatggggatgatattactccccatatcgagggaatgtctaccccactgcgatgtggatcgtaatatccaggggaggagaggggggtgatatattactccccatattc

SEQ ID NO: 2314 - DNA, 77 bp, homo sapiens; identical to SEQ ID NO: 2312

SEQ ID NO: 2315 - DNA, 158 bp, homo sapiens
ccccatccttgtgaatgtactttgtaaattcctcctcgcccttgtgacaatacaccctccccatccttgtgaatgtactttgtaggatgcaccctccccacccttgtgaatgtactttgtaggatacatcctccccacccttgtgaatgtactttgta

SEQ ID NO: 2316 - DNA, 108 bp, homo sapiens
aaaaatagagccatgtttctctagaaacagccatggcaaaataataatacaaattatacagaatattaaaaaatagagccatgtttctctagaaacagccatggcaaa

SEQ ID NO: 2317 - DNA, 84 bp, homo sapiens
agggtcaggatcaccagcatcactgtcttttatgcacacacattagcctgggcctacagagggtcaggatcaccagtatcactg

SEQ ID NO: 2318 - DNA, 112 bp, homo sapiens
gacctgcccccgtgattcaattacctcccactgggtgcctcccagtgggatacccagcacagtcagtccttaccacataaagacctgcccccatgattcaattacctcccac

SEQ ID NO: 2319 - DNA, 114 bp, homo sapiens
atggtcccttaccccaatattcctgccttcgatgtgtgttacacacacacacacacacacacgtattgtgaatgcaaatggtcctttaccccaatattcctgccttcgatgtgt

SEQ ID NO: 2320 - DNA, 99 bp, homo sapiens
tcagttttgaagcattatttagatcagttttgaagcattatttagaataataattattcaaaactgatcagttagatcagttttgaagcattatttaga

SEQ ID NO: 2321 - DNA, 85 bp, homo sapiens
gtatctatgtgggaactaattgaggaccacatttacaatgtgcccaaattgtaaatgtaggagtatctatgtgggaactaattga

SEQ ID NO: 2322 - DNA, 74 bp, homo sapiens
cttcccaagtacctgggactacaccaggttcacgccattctcctacctcaacctcccaagtacctgggactaca

SEQ ID NO: 2323 - DNA, 125 bp, homo sapiens
atttttgttatttaaaaaatctaaacattgctctaaaatatccataaaggcctaattctttcaacagatgttcttgatcatgatttttgttatttaaaaaatctaaacgttgctctaaaatatcc

SEQ ID NO: 2324 - DNA, 80 bp, homo sapiens
ataaggaatgaatccctgggttgaacactcttgcatttcttagatgttcctcatagataaggaatgaatacctgggttga

SEQ ID NO: 2325 - DNA, 132 bp, homo sapiens
gtgaaagaaagggaggtgatatgtacaatgccttaaactaatatttcactatctggaatgaaattaaggaattttgtgaagaagttaatgcgtgaaagaaagggaggtgatatgtacaatgccttaactaag

SEQ ID NO: 2326 - DNA, 87 bp, homo sapiens
taacataaacagttaattaacaaatatcatatacattatatgtattgtatactgtaatcttaacataaacagttaattaacaaatat

SEQ ID NO: 2327 - DNA, 84 bp, homo sapiens
tctgaatttgtcaggcttctgagcccaagctaagccatcataacctcttagcccctaaactctgaatttgtcaggcctctgagc

SEQ ID NO: 2328 - DNA, 90 bp, homo sapiens
aaaccactgctcaaggaaataagagaggacacaaacgagtgtgaaggacctcttcaagaagaaccataaacaactgctcaaggaaataag

SEQ ID NO: 2329 - DNA, 101 bp, homo sapiens
ggaattagtgcccttataaaagaggtcccagagagggcttttgcccttctgccatgggggctacaaaagggaattagttcccttataaaagaggtcccaga

SEQ ID NO: 2330 - DNA, 77 bp, homo sapiens
atgtgggaaagtttggaacttccaagagacttggagggctccgaagacaggaagatgtgggaaagttgggaacttcc

SEQ ID NO: 2331 - DNA, 103 bp, homo sapiens
agcatttgctaatttaattaattaactatatcaagaattcccagagttaactgttgagattccaatcactgcaaaaagcatttgctaatttaattaattaact

SEQ ID NO: 2332 - DNA, 105 bp, homo sapiens
actccccagaaccaggaaagataataagactcctggctctggggagtataataagatcataagactgtctcaaagtccactccccagaaccaggagagataataa

SEQ ID NO: 2333 - DNA, 109 bp, homo sapiens
cctgtaatcccagcactttgggagggcaatgtagaaacacttgaactcaagagttcgagaccaggctgggtgcggtggctcatgcctgtaatcccagcactttgggagg

SEQ ID NO: 2334 - DNA, 125 bp, homo sapiens
gaacataaattgtgaagatttcatggacatttattaggtccccaaattaatacttttataatttcttactcctgtctttcctgcaatctctgaacataaattgtgaagatttcatggacacttat

SEQ ID NO: 2335 - DNA, 97 bp, homo sapiens
taaaactgtctatttctctcttcagttctgtccactatggacagaaagctattaacatcttcaactattattgtaaaactgtctatttctcccttca

SEQ ID NO: 2336 - DNA, 116 bp, homo sapiens
aatagaaagttgggcaaggatagaaagaaatagaatagaaagaaaaaatagaaaaaatagaaaattagaaagttagaaaatagacaaaatagaaagttgggcaagaatagaaagaa

SEQ ID NO: 2337 - DNA, 97 bp, homo sapiens
atatgtaagaataaaatttgaaataatgcacaatgttattctacagcaataactactcttttattcttactatatgtgagaataaaatttgaaataa

SEQ ID NO: 2338 - DNA, 81 bp, homo sapiens
agtaattacaagatctcttgtattccggacttagtcttttaatcacagagcgtgaaagtaattacaagatctctcgtattc

SEQ ID NO: 2339 - DNA, 108 bp, homo sapiens
ccaggctggtcttgaactcctgggctcaagtgatcctcctgcttttttttttgtagatatggggtctcactgtgttgcccaggctggtcttgaactcctggggtcaag

SEQ ID NO: 2340 - DNA, 103 bp, homo sapiens
tagttatttttcctgatcctctcctcctcccactctctactctctggtaggccccagtgtgtgttgttcccgtatccattagttatttttcctgatcctctcc

SEQ ID NO: 2341 - DNA, 118 bp, homo sapiens
aaaaaaaagtcctggacaaacatgatggtaatgattgcacaaaaaaagataaaatgattgcacaaaaaaagataaaaaaaagtcctggacaaacatgatggtaatgatttcacaaaaa

SEQ ID NO: 2342 - DNA, 113 bp, homo sapiens
acgtcctgctcattggtccattttacagagtgctgattggtgcattttcacagagtgctgattggtgtgtttacaatcctttagctagacacagagtgctgattggtacattt

SEQ ID NO: 2343 - DNA, 83 bp, homo sapiens
tctttttattcatcacaatgcacattataacaaataaagagaaaacacagcataccaaaatatttttattcatcacaatgcac

SEQ ID NO: 2344 - DNA, 77 bp, homo sapiens
ttttcttcattagttcacactgctataaagaaatacctgagactgataccaattttctgcattagttcacactgcta

SEQ ID NO: 2345 - DNA, 125 bp, homo sapiens
aattaaaaataaatttaaaaaataaagatgtattttaaaatgaagatgtattttaaaatgcacaataaatataaaatttttgtcaaattaaaaataaatttaaaaaataaagatgtttttaaaaa

SEQ ID NO: 2346 - DNA, 105 bp, homo sapiens
ggacatgttatttaatctctctgtgttatggaaatatgtataatctatccaaatgaatagaaagaaaactgtgtgattcggggcatgttatttaatctctctgtg

SEQ ID NO: 2347 - DNA, 194 bp, homo sapiens
ttgtaaatataccaatcagcactctgtatctagctcagggtttgtgaacacaccaatcagcaccctgtgtctagctcaaggtttgtaaatgcaccaatcagcactctgtgtctagctaatctggtgtgacttggagaacttttatgtctagctaagggattgtgaatgcaccaatcagcactctgtgtctagct

SEQ ID NO: 2348 - DNA, 106 bp, homo sapiens
ctgattggtgcattttacaaacctcttgctagctacagagcactgagaggtgtgtttttacagagcactgattggtgcattttacaaacctcttgctagctacaga

SEQ ID NO: 2349 - DNA, 110 bp, homo sapiens
tatcttccatctgcttctatcttctgtctgcttataatctctctatatatctacatatatagatatatatatctatatatcttctatctgcttataatctctctatatat

SEQ ID NO: 2350 - DNA, 95 bp, homo sapiens
taacatattaaacttatataaaagtatataacttatattaaagtatatgcattttagcaacactgtcaaagcaaaatatataacttatattaaag

SEQ ID NO: 2351 - DNA, 83 bp, homo sapiens
atgttacaaagtacattcataagggaggggaggatgtattgtcacaagggcggggaagaatgttacaaagtacattcacaagg

SEQ ID NO: 2352 - DNA, 76 bp, homo sapiens
atcccttataaatatagacaaaaacattataagaaaactccataagatccaaatcccttataaatatagacaaaaa

SEQ ID NO: 2353 - DNA, 95 bp, homo sapiens
cgttatgaaaaatcatatagaggtaaaggaaacacttaaacactattttggggaatataaattagtacagccattatgaaaaatcatatagaggt

SEQ ID NO: 2354 - DNA, 83 bp, homo sapiens
tggactactggcagggaagattacaaaaatactcatgacaatacctgaaatccaatggactactggcagggaagattacaaaa

SEQ ID NO: 2355 - DNA, 112 bp, homo sapiens
tgtctagctaaaggattgtaaacgcaccaatcagtgctctgtgtctagctaatcaggtggggacttggagaacttttgtgtctagctaaaggattgtaaacacaccaatcag

SEQ ID NO: 2356 - DNA, 84 bp, homo sapiens
agaaacatatgatatagttgactattccttcaataaggctaaaataaaagatgcaaggagaaacatatgatatagtttactatt

SEQ ID NO: 2357 - DNA, 91 bp, homo sapiens
acccattattgaaacattcacacatatgtgcatggcgtgcacacacgcacagacacaatggtacccattattgaaacatgcacacatatgt

SEQ ID NO: 2358 - DNA, 97 bp, homo sapiens
atctatattcccaatttgctgtgtattttttattgcaaattaatgttgcgttctttatcaagttggtaatattcatctatattctcaatttgctgtg

SEQ ID NO: 2359 - DNA, 103 bp, homo sapiens
cactcattcaagcattcattcattcattcaataaatactataaattcattcaaataatactatactatagaaatttattcaataaatacattcattcattcat

SEQ ID NO: 2360 - DNA, 117 bp, homo sapiens
ccagattaccattctacttagcctggtcccaccaaaggcagaggggagctcctagacaaaggcgagatactttcagtgagaaccaccagattaccattctacttagcctggttccac

SEQ ID NO: 2361 - DNA, 123 bp, homo sapiens
atatcttatcaatttttaagcataaaatgcttttgggcaatagaaaactaagactaataatgtatatattcaacaagaatgatatcttatcaatttttaagcataaaatgcttttgggtaata

SEQ ID NO: 2362 - DNA, 164 bp, homo sapiens
ccttgagtttagcctttaaaggataaaaagaggcatgttcaaaatcaatttcctaatagttatacctatttaccaagcatgtaataacaactgatagccttgagtttaaagaccttgagtttagcctttaaaggataaaaagaggcatgttcaaattcaatttc

SEQ ID NO: 2363 - DNA, 93 bp, homo sapiens
ggtagccaccttccaattctaaagctaatgcagaatagcctattgaaatatacttcttttcccataaatggtagccaccttccaattctaaag

SEQ ID NO: 2364 - DNA, 106 bp, homo sapiens
aactaatattcttcaagattatcacaggcaaaaaagccctgaaacctcaactctcgttttcaaaataagcaactaatattcttcaagattatcataggcaaaaaag

SEQ ID NO: 2365 - DNA, 112 bp, homo sapiens
tatttttagtagagtcgaggtttcaccacgttggccaggctggtctcaccacgcccagctaatttttttgttttttatttttagtagagtcgaggtttcaccatgttggcca

SEQ ID NO: 2366 - DNA, 123 bp, homo sapiens
gagcactgattggtgctttttacgagcaatgattggtgcattttacaatcctcttgctagctacagagtgctgattggtgcgtttttacagagcagtgattggtgcattttacaatcctcttg

SEQ ID NO: 2367 - DNA, 96 bp, homo sapiens
taaaattcagcataccctttactgttatgcaataaatgagctcacattaagcaaaacttgaggtcatacatcataaaattcagcataacctttact

SEQ ID NO: 2368 - DNA, 87 bp, homo sapiens
ttaaagaagatcagtaaatgagattataatgtagatgatttaagattaagaatacagcttaaagaagatcaataaatgagattataa

SEQ ID NO: 2369 - DNA, 92 bp, homo sapiens
catttgggcttaggggaaagtccactttgattggttgaagtttcaatcccttagcttgcagctatgacccatttcggcttaggggaaagtcc

SEQ ID NO: 2370 - DNA, 72 bp, homo sapiens
tattttattttaaaatacattatttaaaataattattttattttacaatacattatttaaaatatattattt

SEQ ID NO: 2371 - DNA, 102 bp, homo sapiens
attttttagaatccataaaaggtaagaagtaggagaacatttagaatccacaaaagatgagaagtaggagaacggttggattttttagaatccataaaagat

SEQ ID NO: 2372 - DNA, 84 bp, homo sapiens
tatagtatgtgctattatctgatgggaataatagtatggatatcctgataaggataacagttatagtatgtgctattatctgat

SEQ ID NO: 2373 - DNA, 79 bp, homo sapiens
gaactaaaactaataaatgagttttagtttatttttctgcaaaaaagcaactcctagaactaaaactaataaatgagtt

SEQ ID NO: 2374 - DNA, 111 bp, homo sapiens
tgtcttcagcttgggcaagagtgacaccctatctctgaaaaaaaaaaaaagatttgtgaagcattctttatttgtcttcagcttgggcaagagtgacaccctttctctgaa

SEQ ID NO: 2375 - DNA, 107 bp, homo sapiens
tatccccccaggtcaatactgtgttggttaaaatgaaatactagtccatccttccttactcctgacgtgtatccccccaggccaatactgtgttggttaaaatgaaa

SEQ ID NO: 2376 - DNA, 90 bp, homo sapiens
ctgactacccagtgaatctaaaatcctagtaaatctaaaattgtagtgaatctaggagttgagctggctgactaaccagtgaatctaaaa

SEQ ID NO: 2377 - DNA, 144 bp, homo sapiens
ggagggggcggctggcctggcggggggctgacccccccacctccctcctggacggggcggctggcctggcggggagggggcggctggcctggcggggggctgacccccccacctccctcctggacggggcggctggcctggcgg

SEQ ID NO: 2378 - DNA, 90 bp, homo sapiens
ttgcccatttctaaatcctgtatgcccgcagtaaagatagtttggggattttaaaagttttctctattacccatttctaaatcctgtatg

SEQ ID NO: 2379 - DNA, 71 bp, homo sapiens
ggccatgatgtggtttctattaaattacaggtgtgagccaccgtacctggccatgatgtgatttctattaa

SEQ ID NO: 2380 - DNA, 109 bp, homo sapiens
ttcaatttatcttttttcttttgttgttgatgatatatatttaatttgctcttgatgatgtatatttaaatttttatgacgttcactttatcttttttcttttgttgtt

SEQ ID NO: 2381 - DNA, 65 bp, homo sapiens
tgctgggattacaggcgtgagccaccacgcctggccccaaaatgctgggattacagacttgagcc

SEQ ID NO: 2382 - DNA, 88 bp, homo sapiens
cactagtcgtggatttgaatgagctgacatggagccaggccttgaaggatcttgaggaacagagtcactagtcgtggatttgaatgag

SEQ ID NO: 2383 - DNA, 148 bp, homo sapiens
gaggtgggtggattacctgaggtcaggagttcgagaccagcctggccaaaaggccaggggcgatggctcatgcttgtaatcccagcactttgggaggcggaggcgggtggattacctgaggtcaggagttcgagaccagcctggccaa

SEQ ID NO: 2384 - DNA, 103 bp, homo sapiens
tcagcacacatatgcaaaaattttgtcattactcaaagttctgttgtcagtgctattaaggaactctctgactggtccttcagcacagatatgcaaaaatttt

SEQ ID NO: 2385 - DNA, 108 bp, homo sapiens
cttaatcattttataatcggtttcactttaaagagaactattcattttttggttttataaaaccaaactataataacttaatcattttataatcggtttcagtttaaa

SEQ ID NO: 2386 - DNA, 108 bp, homo sapiens
tcatttaatttttaaaatgatgtttgttgtttgtttcctgtctctccgccccgagccttttcagtttctaagacattttatcatttaatttttaaaatgatgtctgtt

SEQ ID NO: 2387 - DNA, 107 bp, homo sapiens
gacagaaataatacaggtatatgtttgtcacaatggtttctttatctgtaaaatgagaacatttacagctgcgacagaaataatacaggtatatgtttgtcacaatg

SEQ ID NO: 2388 - DNA, 108 bp, homo sapiens
tcctggcacattgtaaactcttaataatacatattgcattgttttgaagattaaatgagttatatataaggcacttagaataactcctggcacattgtaaactctaag

SEQ ID NO: 2389 - DNA, 84 bp, homo sapiens
gaacttttattacctgagagtgataaaaacttttgatgactaaatatggctagatgaacttttattacctgagagtgaaaaaaa

SEQ ID NO: 2390 - DNA, 86 bp, homo sapiens
tatttatttatttgtccaaaacataatacatgaagaagcttaaaaataaagtatacttatttatttatttatccaaaacataatac

SEQ ID NO: 2391 - DNA, 78 bp, homo sapiens
tctctaggaagttccaaattttccaacatcttcctatcttctgagccctctaagtctctaggaagttccaaactttcc

SEQ ID NO: 2392 - DNA, 76 bp, homo sapiens
agaatataaagtggaaaagtactttttcttttatctttctcttattctttaaagaatataaagtagaaaagtactt

SEQ ID NO: 2393 - DNA, 105 bp, homo sapiens
cataacaatggattggaagagttaatattattaagatgtcaatactgccccccaaaaataaatggaagtgtatcccataactatggattggaagagttaatatta

SEQ ID NO: 2394 - DNA, 104 bp, homo sapiens
acctcgtggtaacattaaacaaaagaaatacaatgatcacacaaaacatgtatttcctgtacccgttacctcatggtaacattaaacaaaagaaatacaatgat

SEQ ID NO: 2395 - DNA, 108 bp, homo sapiens
tgcaattacttttgcaccaaccaaattgcaccacaattacttttgcaccaacctaatagttattaaaagtagaggtaaaaatcacaattacttttccaccaacctaat

SEQ ID NO: 2396 - DNA, 98 bp, homo sapiens
tttaggaagtcagcacaaattggccttagatttcctgcccccagaccttggtgttttcctttgatttagctttaggaagtcagcacgaattggcctta

SEQ ID NO: 2397 - DNA, 108 bp, homo sapiens
attcattcagcagcccatagatcagggaataatttcatctttcaagatgaacattttgtaaggctatggctgccatagatagtgattcattcagcagcccatggatca

SEQ ID NO: 2398 - DNA, 125 bp, homo sapiens
ataagtgtccatgaaatcttcacaatttatgttcagagattgcagtaaagacaggtgtaagaaattacaaaagtattaatttggggaacaaataaatgtccatgaaatcttcacaatttatgttc

SEQ ID NO: 2399 - DNA, 113 bp, homo sapiens
agatgctgttgattggtccattttacagagtgctgattggtgcatttttacagggtgctgattggtgcgtttacaaaactttagctagacacagagcgctgattggtgcattt

SEQ ID NO: 2400 - DNA, 287 bp, homo sapiens
caccaatcagcactctgtatctagcccagggtttgtaaatacaccaatcagcaccctgtgtctagctcaaggtttgtaaatgcaccaatcagcactctgtgtctagctgatctggtggggacttggagaacctttatgtctagctaagggattgtgaatacaccaatcagcactctgtatctagctagtacaaagtaataacaagaaaaaagatgtttaaaatacattttgaaaaactcacaaagcgagtctctatggaaatcagtacaaagtaataataagaaaaa

SEQ ID NO: 2401 - DNA, 100 bp, homo sapiens
actaaaatgtttatattggtttaataaaataaaataatttaataaatggtgatgaaagtaactttgaagataataagactaaaatgtttatattggttta

SEQ ID NO: 2402 - DNA, 174 bp, homo sapiens
ctagattagctagatacagagtgtggacacaaaggttctccaactccccaccagagtagctagagtagctagagtagctagatacagagtgtcaattggtgcattcacaaaccctgagctagacacagggtgctgcttggtgtgtttacaaaccttgagctagatacagagtgc

SEQ ID NO: 2403 - DNA, 93 bp, homo sapiens
agtgcctggcactcaggaggttctcgattaatatatttcccacccatgttcctgggacccagccagtggctggcactcaggaggttctcgatt

SEQ ID NO: 2404 - DNA, 84 bp, homo sapiens
atcaggaaaaatagctaatgcatgccaggctaatatcaggaaatatatatatcaggctaatatcaggaaaaatagctaatgcat

SEQ ID NO: 2405 - DNA, 84 bp, homo sapiens
agtgtggcatataggacttctcctgtctattatctcaagataaagtctaagtctgtagtgtggcatataggacttctcctgtct

SEQ ID NO: 2406 - DNA, 110 bp, homo sapiens
attgcaaactctcaagcaaccacttaaaagtaacactataccactaacaacttaaaagtaacactataccactaaatgcacattgcaaactctcagcaaccacttaaaaa

SEQ ID NO: 2407 - DNA, 106 bp, homo sapiens
gatgatgcttgcagagccatgtgaatataataaaatccactgaaaatgttcttataattagatggtgatgatgcttgcagagccatgtgaatgtaataaaatccac

SEQ ID NO: 2408 - DNA, 84 bp, homo sapiens
atccattgatgtttccggcttactgaaccggattactgaaccggattactgaaacatccattgatgtttccggcttactgaacc

SEQ ID NO: 2409 - DNA, 124 bp, homo sapiens
aacataaattgtgaagatttcatggacacttattagttccccaaattaatacttttataatttcttatgcctgtctttaccgcaatctctgaacataaattgtgaagatttcatggacacttat

SEQ ID NO: 2410 - DNA, 114 bp, homo sapiens
agctgtttcttttcttttcttttcctttctctctctctctctcaaccagttgtttcttttcttttttcttttcttttcttttcttttcttttcttttcttttcttttcttttct

SEQ ID NO: 2411 - DNA, 88 bp, homo sapiens
agaacagtgcctgggacatggtatgtgcttaattcatattagggaaaggggtgtaagttccttaagtaacagtgcctgggacatggta

SEQ ID NO: 2412 - DNA, 94 bp, homo sapiens
atgtgacatggacacaaacacaatgtgagatgtgtttgtgagatggacaaacaaaaatgtgagacacaaaaatgtgagatggacacaaacacaa

SEQ ID NO: 2413 - DNA, 85 bp, homo sapiens
tcagtatttactcagtttttctgtataagtaccgcgcgctaaccgattgcgccactggagctctagtatttactcagtttttctg

SEQ ID NO: 2414 - DNA, 119 bp, homo sapiens
ttaaagaaaagaattttcaacccagtgtttcatattcagccaaactaagcttcataagcaagtgggggccaatatccaacattgttaaagaaaagaattttcaacccagtatttcatat

SEQ ID NO: 2415 - DNA, 130 bp, homo sapiens
aggcagaggttgcagtgagccgagattgtgtcactgcacgccagtctaggcagcagaacaagactccatctcaaaaaaaaaataaaaaacaaggcagaggttgcagtgagccgagattgtgtcattgcac

SEQ ID NO: 2416 - DNA, 99 bp, homo sapiens
cagcctgggctacagagtgagactctgtcttgaaaaacaaaacaaaacaaaaaaagaagtaaacaattagataatcagcctgggctacagagtgagact

SEQ ID NO: 2417 - DNA, 125 bp, homo sapiens
gaacataaattgtgaagatttcatgggcatttattagttccccaaattaatacttttacaatttcttatgcctgtctttactgcaatctctgaacataaattgtgaagatttcatggacatttat

SEQ ID NO: 2418 - DNA, 123 bp, homo sapiens
aaatgtccatgaaatcttcacaatttatgttcagagactgcagtaaagacaggcataagaaattataaaagtattaatttggagaactaacaaatgtccatgaaatcttcacaatttatgttc

SEQ ID NO: 2419 - DNA, 111 bp, homo sapiens
aagataccataagatactgtacatgaggctgggcgcggtggctcacgtcttatttcttctgcttgcctctgagttgacaagataccataagatactgtacatgaggctggg

SEQ ID NO: 2420 - DNA, 100 bp, homo sapiens
ttttgagaaaggttcaagcttacagagacattgaaacacctggccgaaaaatatatttttttcaactttattttgagaaaggttcaagcttatagagaca

SEQ ID NO: 2421 - DNA, 75 bp, homo sapiens
cccccgccaggccagctgccccgtcagggagggaagtggggggggtcagccccccgcccggccagctgccccgtc

SEQ ID NO: 2422 - DNA, 279 bp, homo sapiens
acataccaatcagcactctgtgtctagctcaaggtttgtaaatgagacaatcaacaccctttgtatagttcaaggtttgtaaatgcaccaatcagtgctctgtgtctagttaatctagtggggacttggagaactttgatgtctagctagaggattgtaaatacaccaatcagccctctgtgtctagctcagggactgtaaatgcaccaatcagcaccctgtcaaaacagaccaatcagctctctgtaaaatggaccaatcagctctctgtaaaatggg

SEQ ID NO: 2423 - DNA, 100 bp, homo sapiens
tggggacttggagaacttttatgtctcagggtttgtggatgcaccaatcagtactctgtatctagctaatctgatggggacttggagaacttttatgtct

SEQ ID NO: 2424 - DNA, 98 bp, homo sapiens
aatcataaaagacagatctagaagtatatggttgttagatatatcaagcaagataaacacatcagaagagaaaaaaatcataaaagacagatttagaa

SEQ ID NO: 2425 - DNA, 101 bp, homo sapiens
aatttctacaagccactacaaacagaaaacattgacaaaaatattaatcgcaatatataaataaagaatttctacaagccactacaaaaagaaaacattga

SEQ ID NO: 2426 - DNA, 517 bp, homo sapiens
ccccacccacatcctgctgattggtccattttacagaaagctgattggttcattttgacagggtgctgattggtgtgtttacaaaccttgagctagacacagagtgctgattggtgcatttacaatcctctagctagacataaaagttctccaagtcctcaccagattagctagatacagagtgctgattggtgcatccacaaaccccaagctagacacagagtgctgattggtgcatttaccatccctgagctagacacagagtgctgattggtgtatttacaatcccttagctagacataaaagttctccaagtcctcattagattagctagacacagagcactgattggtgcatttacaaaccttgagctagacacagagtgctgattggtgcatttacaatccttgagctagatacagagtgctgattggtgcattttcaatcctctagctagacacaaaagttctccaagtccccactagataagctagacacagaacactgattggtgtgt

SEQ ID NO: 2427 - DNA, 151 bp, homo sapiens
atttatacctctgcctcaacattccacccagctttagaaataatccatttatacctctgcctcaaccatttatacctctgccttaacatttatacctctgcctcaacatttatacctctgccttaaccatttatacctctgcctcaacatt

SEQ ID NO: 2428 - DNA, 251 bp, homo sapiens
aggtatattggcctatatatatatctatctatatagacatatatagatagatatagatatagatatatagatagatatagacctatatagatatagatatatagatagatatagacatatatatatatatatatataggcccatatgggcatatatatatatatatatatatataggccaatatgggcctatatatatatatatatatatatatatatataggccaatatggacctatatatatatatata

SEQ ID NO: 2429 - DNA, 118 bp, homo sapiens
cctcaggcaatcttctcatcttggcctcccaaaagcaattactttttcatcaacttagtaactcactgcagcctcaaactcctggcctcaggcaaccttctcatcttggcctcccaaa

SEQ ID NO: 2430 - DNA, 104 bp, homo sapiens
ggattgccaggccgaaactcttgttgacttgtagaggtactgccttgccgatcttggataagatccagaagaattctcaggattgccaggcagaaactcttgtt

SEQ ID NO: 2431 - DNA, 80 bp, homo sapiens
gtatctggtagtagcagccttactagttccctcatggtttcctatagaaagaaggtatctggtagtagtagccttactag

SEQ ID NO: 2432 - DNA, 76 bp, homo sapiens
aaagagctttgtgtaaagctctttgtgtagtcacaaactagtaactaaaactaaagagctttgtgtaaagctcttt

SEQ ID NO: 2433 - DNA, 102 bp, homo sapiens
cccctaggaaagcgggacttgccgctaagggtgaaggagaaggggttgaggggtacttgcccctgccccaggaaagcgggacttgccgctaagggtgaagga

SEQ ID NO: 2434 - DNA, 101 bp, homo sapiens
attttgataattttgtgcattaaacaaagtttgtgcatgaaacaaagttatagcaagagagttaaagaagattttgataattttgtgcatgaaacaaagtt

SEQ ID NO: 2435 - DNA, 105 bp, homo sapiens
ttatttatttatttattacttatttatttattgggtcttgctttgctaactttatttgtttatttacttacttatttatttatttatttattgggtcttgctttg

SEQ ID NO: 2436 - DNA, 95 bp, homo sapiens
aagagaaatgtgtatgttaatatttataggataaaaattggtatattttaaagttttaaaatttttgtctccaagtgaaatgtgtatgttaatat

SEQ ID NO: 2437 - DNA, 102 bp, homo sapiens
caccaatcagcactccgtaaaaatggaccaatcagcactctgtgtctagctaaaggtttgtaaaagcaccaatcagcactctgtaaaaatggaccaatcagc

SEQ ID NO: 2438 - DNA, 118 bp, homo sapiens
ggtgagcacaactattccaatcagcagggtccagggacctttgcgggttcttgggcaggggtttttctgctgctgtgttggtgagcgcaactattccaatcagcagggtccagggacc

SEQ ID NO: 2439 - DNA, 75 bp, homo sapiens
aatgtcatcagttaaggcaggaacaggccgttttcatttcttttgtggtggaatgtcatcagttaaggcaggaac

SEQ ID NO: 2440 - DNA, 82 bp, homo sapiens
gcactaggaggctcattcctagagttgtctgatctagttatatgcaagattccagagcactaggaaggctcattcctagagt

SEQ ID NO: 2441 - DNA, 115 bp, homo sapiens
caaatagaaatttggctaggagttaaaatttatctaatcctaaccgttaattctgcccgaatatcagatagagcaacaccagttccaaatagaaatttggctaggagttaaaatt

SEQ ID NO: 2442 - DNA, 113 bp, homo sapiens
tacatatcctaagaataaacaaaagaaatattaaggttttcttttcttgtgtccttatgaaaaattcttgtacatatcctaagaataaacaaaagaaatattaagattttctt

SEQ ID NO: 2443 - DNA, 90 bp, homo sapiens
tggaattcctaagctacctttgtcgggccacaggaattaatggagaattaattaattccagagaaatggaattcctaatctacctttgtc

SEQ ID NO: 2444 - DNA, 91 bp, homo sapiens
agtttcaaaatcacagtaaaaatagtatacttcagtatactatcagtaatagtaacttcagttccaaaatcacagtaaaaatagtatactt

SEQ ID NO: 2445 - DNA, 140 bp, homo sapiens
agcaatatacataaacatataaggaatatatgtttatgtatatacatcaacatatacaatatacataaacatataagcaatatacataaacataaaaggaatatgtatatgagcaatatacatacacatataatttatac

SEQ ID NO: 2446 - DNA, 125 bp, homo sapiens
ataaatgtccatgaaatcttcacaatttatgttcagagattgcagtaaagacaggcgtaagaaattataaaagtattaatttggggaactaataaatgtccatgaaatgttcacaatttatgttc

SEQ ID NO: 2447 - DNA, 139 bp, homo sapiens
cctgcagattttaaccttgactctgtgtgtgtgtgtgtgtgtgtgtgtttgtgtgtacacatatatatacacacacacacaaagctggcctatcctgcagattttaaccttgactctgtgtgtgcgtgtgtgtgtgtgt

SEQ ID NO: 2448 - DNA, 120 bp, homo sapiens
cttccactctgacaatggtttctctctcccaccagtcagttttgatttattcaatatcggttgaaattctacctttcttccactctgacaatggtttctctctcccaccagtctgttttg

SEQ ID NO: 2449 - DNA, 74 bp, homo sapiens
aatcgagtattcaaaagataatcactttcaagtattcaaatcgagtattcaaatcgagtattcaaaagataatg

SEQ ID NO: 2450 - DNA, 114 bp, homo sapiens
ttgagtgtgttatttaatttctgccaagcatctgaataagcacagttacacttgataatcatttattaactctagcagtgctgaagttgaatgtgttatttaatttctgccaag

SEQ ID NO: 2451 - DNA, 91 bp, homo sapiens
aagtgttgagagtcactggtatagtgtcttttttatggaaaaacatttattttgtagtttatgtattaagtgttgagagtcactggtaaag

SEQ ID NO: 2452 - DNA, 123 bp, homo sapiens
gatttagtggccctgactgacacattctcaaaaacctgcacccttgcctgtcctcctagaccacaaggaggactgagaaaaatcagatttagtggcccttactgacacattctcaaaaacctg

SEQ ID NO: 2453 - DNA, 72 bp, homo sapiens
tctgcagaatttcaaacctgttctaatcccatatgagggatgagtagaatctgcagaattgcaaacctgttc

SEQ ID NO: 2454 - DNA, 174 bp, homo sapiens
ggactacctgcctgcagagaggagatagaccactctagggcctactgcctactgtgtgctgaaagctgaacactcaacaggacaacctgcctgcagagaggagcttctacctccagggcctcctctttgctaggagctggacacttgttgggacaccctggctatgaagaggag

SEQ ID NO: 2455 - DNA, 102 bp, homo sapiens
aaacattcattttaaaacattttttcaatgttgaaaacatttaaatattcatttaaatttttttaaatgttaaaaacaaacattcatttaaaaacatttttt

SEQ ID NO: 2456 - DNA, 146 bp, homo sapiens
gtcttaggcagcaggcagccacagtgatggtggcctcccctccctctgggagttcaggtgtcttgggcagcaggcagccacagtgaagatggctgccccttttcctggggaactccatagtcttaggcagtctccagccaagtggc

SEQ ID NO: 2457 - DNA, 96 bp, homo sapiens
gtaaatccacagatatgcaactctacccagtttttaaaaatatttaaccttcaactagcttttggtatgtaaatccacagataagcaactctaccc

SEQ ID NO: 2458 - DNA, 79 bp, homo sapiens
caagtctctagaaagttccaaacttgtacatatctttctgtcttctgagctctccaagtctctaggaagttccaaactt

SEQ ID NO: 2459 - DNA, 80 bp, homo sapiens
gcaatactaagatgattatacctgatgatataatcattgcaatactaagataatggcaatactaagatgataatacctga

SEQ ID NO: 2460 - DNA, 74 bp, homo sapiens
gacccttatcagtagttctgcttttgcagtttgccttgtgatctctgttggacccttatcagtagttctgcttt

SEQ ID NO: 2461 - DNA, 61 bp, homo sapiens
tatattttatatatatgtatatatatatgtgtgtgtatatatatatatatatatatagtct

SEQ ID NO: 2462 - DNA, 146 bp, homo sapiens
aacccaccaggaggaacaaacaactccagatgtgccacctttaagagctgtaacactcactgcgaaggtctgtggcttcactcctgaagccagcgagaccatgaacccaccaggaggaacaaacaactccagatgtgccactttag

SEQ ID NO: 2463 - DNA, 82 bp, homo sapiens
cctggttctcaggtcttcaaactccaggacttataccagcaaccatcctcctacgtccccctggttctcagatcttcaaact

SEQ ID NO: 2464 - DNA, 98 bp, homo sapiens
tagtagaaatcagaaagccacagatttgtggtggcaaaatgaaaaccatagtttaaaaacagcagtattgggactagtagaaatcagaaagtcacaga

SEQ ID NO: 2465 - DNA, 111 bp, homo sapiens
gaaagtcaaatgataccatttatgagaatggttttgttatatttgagacagaatctcacaattttacctgtgggaaagtcaaattataccatttatgagaatggttttgtt

SEQ ID NO: 2466 - DNA, 107 bp, homo sapiens
ggaatataaattttttcactgacttctttgcctaaagaggaaaagaatagaagagaagccaaggggataggggaatataaattttttcactgacttctttgcctaaa

SEQ ID NO: 2467 - DNA, 80 bp, homo sapiens
aaaacatcagatcatgagatctgagatctgatggttttataatgagtgatagtataaaaccatcagatcatgagatctga

SEQ ID NO: 2468 - DNA, 72 bp, homo sapiens
gacactctgtatctagctactctggtggggacttggagaacctttgtgtgacactctgtatctagctaatct

SEQ ID NO: 2469 - DNA, 92 bp, homo sapiens
acaatggcaagtctttagcccgatcgggagtggcaatgggtatctcactggatcaggagcacagtggacaatggcaagtctttagccagatc

SEQ ID NO: 2470 - DNA, 75 bp, homo sapiens
actcagtaacacacacggcaaaggccattatgagaaaaatatctgagtgtacacagtaacacacacggcaaaggc

SEQ ID NO: 2471 - DNA, 83 bp, homo sapiens
ggaggatacttgcttcccaattagagacacttgtgctagagtttcctgactcttcactgggaggatacttgcttgccaattag

SEQ ID NO: 2472 - DNA, 106 bp, homo sapiens
tattctgtattttattaagccgtattggatattacatgatttcaaaagcaatgattgctgtagatgactaggaaaatattctgtattttattaagccatattggat

SEQ ID NO: 2473 - DNA, 123 bp, homo sapiens
taataaatgtccatgaagtcttcacaatttatgttcagagattgcagtaaagacaggtgtaagaaattataaaagtattaatttggggaactaataaatgtccatgaaatcttcacaatttat

SEQ ID NO: 2474 - DNA, 79 bp, homo sapiens
ctaaatatgcacaatattatctttaaagttatctaaataattttagttagttggctaaatatgcacaatattatctaaa

SEQ ID NO: 2475 - DNA, 94 bp, homo sapiens
tggtccagccattctgtgcctgtgtatttacacacacacacacacacacacacacacacacacattggtccagccattccgtgcctgtgtattt

SEQ ID NO: 2476 - DNA, 138 bp, homo sapiens
atttgttacattcatgaccacaatctttccagtcttctgatcagaaagatagatgagtgggtagtctttgcttggtggtagagatagaaccatctatttatttgttacattcatcaccacaatctttccagtcttctg

SEQ ID NO: 2477 - DNA, 82 bp, homo sapiens
gaaagtttggaacttcctagagacttgtggggctcagaagacaggaaaacataggaaagtttagaacttcctagagacttgt

SEQ ID NO: 2478 - DNA, 142 bp, homo sapiens
tttttagaatagtttgagtaggattggtattagttctggtttggtatcagggtaacactggcctcatagaatgagtttggaagcattcccttttcctctatttttagaatagtttgagtaggattggtattagttcttgttt

SEQ ID NO: 2479 - DNA, 89 bp, homo sapiens
agtgcaggagctcagtcaaaaacagtgggtgactccattttggtttggttgttggggctgagtgcaggagctcagtcaaaaacagtggg

SEQ ID NO: 2480 - DNA, 113 bp, homo sapiens
gaacataaattgtgaagatttcatggacatttattagttcccaaaattaataatttcttatgcctgtctttgctgcaatctctgaacataaattgtgaagatttcatagacat

SEQ ID NO: 2481 - DNA, 159 bp, homo sapiens
caggaaaggacataacaaaaaaagaaaactacagagcaatatccatgatgaacacagatgcaaaaatccacatattctatgaagtcagtatcatcctaatactaaaaccaggaaaggacataacaaaaaaagaaaactacagaccaatatccatgatga

SEQ ID NO: 2482 - DNA, 86 bp, homo sapiens
tccccagcagtaggtgccaatatcctcaccatagtctactttcattctctcaatattccccagcagtaggtgccattatcctcacc

SEQ ID NO: 2483 - DNA, 83 bp, homo sapiens
tacattgcccttagtaatggcgccaacctctatttacgtgttatttagatctattacattgcccttagtaatggcgccaacct

SEQ ID NO: 2484 - DNA, 108 bp, homo sapiens
caccaatcggcactctgtatctagctcaaggtttgtaaacacaccaatcagcaccctgtgtttagctcaaggtttgtgaatgcaccaatcgacactctgtatctagct

SEQ ID NO: 2485 - DNA, 98 bp, homo sapiens
ccctcaaatatacaaaaattagcccaagaccagcctgcgcaacatggtgaaaccctgtctctaccaaaaaaaacccctcaaaaatacaaaaattagcc

SEQ ID NO: 2486 - DNA, 142 bp, homo sapiens
atttggaaagctgtattatagaaataattttaaaaccaagggctgcattacttaaatcttaaatcacccaatactctctatgaagatgctatttggaaagctgtattacagaaataattttaaaaccaagggctgcattact

SEQ ID NO: 2487 - DNA, 82 bp, homo sapiens
agctgcatctggtggcaggctttataatggcaggtaagctgatgtacttcaattgtgcagctgcatttggtggcaggcttta

SEQ ID NO: 2488 - DNA, 75 bp, homo sapiens
aaatgttgttattctctttttgctatttcatatgaagccccttagcatgtttaaatgttgtgattctctttttgc

SEQ ID NO: 2489 - DNA, 98 bp, homo sapiens
agtggccatggccccctgatatgtgaaattgaattagagaactaagacttgcacatgcacagaacagggtagtggccatggccccctgatttgtgaaa

SEQ ID NO: 2490 - DNA, 96 bp, homo sapiens
tatagtctttaaattaagactttaagattttactttaaatatatgtagtcaaatatatataatttaaagactatagtctttaaattaagacattaa

SEQ ID NO: 2491 - DNA, 102 bp, homo sapiens
gacaggagttcaaaactagcctgagcaacacagtaagacccctctctctacaattattattattttttaattagctgaagacaggagttcaaaactagcctg

SEQ ID NO: 2492 - DNA, 74 bp, homo sapiens
aaaaaaattgaagaggagggaattcttgaacattcttatcaaacgattctaaaaaaattgaagagaagggaatt

SEQ ID NO: 2493 - DNA, 86 bp, homo sapiens
agtatttaacatgggttgtcagtttcctgtaacattactacatatatatattttttttactttactatttaacatgggttgtcagt

SEQ ID NO: 2494 - DNA, 71 bp, homo sapiens
tactatctactgtggaaaccaaatctgttataacatataaatatatactactatctactgtggaaatcaaa

SEQ ID NO: 2495 - DNA, 99 bp, homo sapiens
tgttgacagctgcaaaccataggctatgatagcattagggaaatggcattattctgaagactctgttgacagctgcaaaccataggctatgacagcatt

SEQ ID NO: 2496 - DNA, 84 bp, homo sapiens
cactcagtctctccccttcaaaaattagtctatacctgagaactttaatttcttatcactcagtctctcctcttcaaaaattag

SEQ ID NO: 2497 - DNA, 87 bp, homo sapiens
cctataatcccagcactttgggaggtcaaggtgagcagatcagctgggcatggtggctcacacctgtaatcccagcactttgggagg

SEQ ID NO: 2498 - DNA, 113 bp, homo sapiens
taaaatacttagatttctttcagggtctgctgtctggatatgtcaaagaaatatattttgggcaaaatatattggggtaaaatacttagatttctttcagggcctgctgtctg

SEQ ID NO: 2499 - DNA, 116 bp, homo sapiens
aaaacaggtagagtatatattcatccccctattttatatgtatcatatatatgatatatatattaattgataaatgatataaattgtaaaacaggtagagtatatgttcatccccc

SEQ ID NO: 2500 - DNA, 64 bp, homo sapiens
agaactttattttcatattttcatttggatatcttctccaaggtttttttatatatatttttat

SEQ ID NO: 2501 - DNA, 125 bp, homo sapiens
ttataagtaatcttaccatgtccaagaataaagctcttttaagctttattaaaagcaattttaaacctaccttttaaggtaggattaattataattaatcttaccatgtccaagaataaagctct

SEQ ID NO: 2502 - DNA, 102 bp, homo sapiens
atctgcattaaggtgtgattaatcaatcataccttgctgctataataatttattataagggctatattaatgcatctgattaaggtgtgattaatcaatcat

SEQ ID NO: 2503 - DNA, 76 bp, homo sapiens
caaaactgaggtttcaagaagagcacccccccttttttttcaaattctactagcaaaactgaggtttcaagacgag

SEQ ID NO: 2504 - DNA, 91 bp, homo sapiens
ctcccctcaacacccgctagtgtttgagcgacgttgtgtgtgaaacacgttggtgtttcaccgacgtcctcccctcaacacccgctagatg

SEQ ID NO: 2505 - DNA, 116 bp, homo sapiens
gcataatcctcaaggtcctaattttctgctgaagctggtgaaggcttctccaatctgttctcagaagcaattcatccacaaggcataatcctcaaggtcctaattttctggtgaag

SEQ ID NO: 2506 - DNA, 91 bp, homo sapiens
ctgattggtgcatttacaaacctttagctagacacagagcgctgattggtgcatttttagagtgctgattggtgcatttacaatcctttag

SEQ ID NO: 2507 - DNA, 111 bp, homo sapiens
tgcaccttgcctgtcctcctagaccacagaggaccaagaaaaatcggatttaatggcccttaccaatgcattctcgaaaacctgcactcttgcctgtcctcctagaccaca

SEQ ID NO: 2508 - DNA, 81 bp, homo sapiens
agatgcatagagccttatggcatctgtggcagatagatgtgccaaagatggctgacagatgcagagagccttatggcatct

SEQ ID NO: 2509 - DNA, 101 bp, homo sapiens
ccggcagccaagctcaagctttcaggctctcatttcaaagtgtcccgaggtgattcgccccagggcgcacggcacccggcagccaagcccaagctttcagg

SEQ ID NO: 2510 - DNA, 117 bp, homo sapiens
gatatagtagctttctgagctactatataatagctttctaagaacatttatatatgttcattaatacatacatacattttatgtcatatataatagctctctaagaacatttatata

SEQ ID NO: 2511 - DNA, 102 bp, homo sapiens
gaaatctacattagtaaaagtatctatcaggaagctctgaaaaactcattttataaaagaaatttagatctataaaggaaatctacattagtaaaagtatct

SEQ ID NO: 2512 - DNA, 104 bp, homo sapiens
ctattttcttctagtagtttcatagttttgggtttttaaagaagaccaatgtcctgaaacattccctctattttcttctagtagtttcattgttttgggttttt

SEQ ID NO: 2513 - DNA, 100 bp, homo sapiens
taatcccagcactttgggaggctgaggtgggtggattacttgaatatttaagacaatatgactataatcccagcactttgggaggctgaggcgggtggat

SEQ ID NO: 2514 - DNA, 113 bp, homo sapiens
ataactagttaaaatactaattatgaaaatattcatggggtgaagtttatgctcagatgtgtgaatctagttattaacataactagttaaaatactaattatgaaaatattca

SEQ ID NO: 2515 - DNA, 111 bp, homo sapiens
agaatctcttttcctttttctttcttgtaaagaaaagaaagaaaaaagaatctcttgtattctttttcaatacaaagaaaggaaaagaatctctttttctttttctttctt

SEQ ID NO: 2516 - DNA, 91 bp, homo sapiens
caaacattcaaatgatcatttccaactttttacttcttattgactgttctatacttttagaggcctcaaacattcaaatgacatttccaaa

SEQ ID NO: 2517 - DNA, 82 bp, homo sapiens
taattacaaattaaatgacatagttctgtggtatatgtcagttgaatggaggcactatgtaattacaaattaaattacatag

SEQ ID NO: 2518 - DNA, 75 bp, homo sapiens
taaaaaacatttatataattcttgcacacgtaccctggaacttaaagtataataaaaaaaatttatataattctt

SEQ ID NO: 2519 - DNA, 87 bp, homo sapiens
gtttgggttgtgcaaaataaactatacccactctatacaggtaatcattgtttttgagaaggagtttgggttgtgcaaaataaacta

SEQ ID NO: 2520 - DNA, 158 bp, homo sapiens
tgataatatttcattgatgcttgtctattcaatactatcaaagatagaggtcagtgttggtgtctcagacaaatacataatatcatcttgactactcttgagctgatcatatttcattgatgcttgtctattcaatactatcaaagatagaggtcagt

SEQ ID NO: 2521 - DNA, 90 bp, homo sapiens
ctcatttttcagttctacttaggttttttttagaaattccttcttcacacattacctctagaacttacttatttttcagttctacttagg

SEQ ID NO: 2522 - DNA, 95 bp, homo sapiens
cataaagttattaagtttaatttgatatcataaagttattaagtttaatttgaatattatttaatttaataccataaagttattaagtttaattt

SEQ ID NO: 2523 - DNA, 88 bp, homo sapiens
tctggaaagccatgtagaatatgtcattcaacatgagaagactgaataaaacaaaactcatctggaaaaccatgtagaatatgtcatt

SEQ ID NO: 2524 - DNA, 111 bp, homo sapiens
catgagctcaggagttcgagaccagcctgggcaatgtaaggagacattttgggaggccaaggtgagtggattgcatgagctcaggagttcgagaccagcctgtgcaatgta

SEQ ID NO: 2525 - DNA, 89 bp, homo sapiens
aatgatagtacatgcttataaaattaggctgggttgctgctttacaaagatgattaggtaattataatgatagtacatgcttataaaat

SEQ ID NO: 2526 - DNA, 90 bp, homo sapiens
tggcttttaccattaaggtaaaacacaaaagcagtgtatattagtggctttgtatatgagtggcttttaccattaaggtaaaacacaaaa

SEQ ID NO: 2527 - DNA, 98 bp, homo sapiens
gaggaggccctggagagggtagctcctcttcgcccattggttgtccagtcctctgctgcttccagcagggaggaggccctggagagggtggctcctct

SEQ ID NO: 2528 - DNA, 151 bp, homo sapiens
acttttctgggaaaggggcaagtaccccaaccccttctctccttgtctctaccccttctctgcttttctgggggaggggcaagtacccctcaaccccttctccttcacccttagcagcaagtcccgcttttctggcggaggggcaagtacc

SEQ ID NO: 2529 - DNA, 117 bp, homo sapiens
agttatcataattaagatataagagctaagaccacttctaacactaacaaagacatccacaaaagcaattatcatagatgaaaacagttatcataattaagatataagagcaaagac

SEQ ID NO: 2530 - DNA, 83 bp, homo sapiens
cttatctaccaacatgctcaatatggctttgcagggttcactgtctaccagcagggttcactatctaccaacatgctcaatat

SEQ ID NO: 2531 - DNA, 75 bp, homo sapiens
aatgtcatcagttaaggcaggaacaggccattttcagttcttttgtggtggaatgtcatcagttaaggcaggaac

SEQ ID NO: 2532 - DNA, 78 bp, homo sapiens
atgtgggaaagtttggaatttcctagagatttggacggcttagaagacaggaggatgtgggaaagtttggaacttcct

SEQ ID NO: 2533 - DNA, 96 bp, homo sapiens
gagtgggtagctcctgtctgcagctggtcgtcctaatgtctgctgctctcagcagagaggaagccctagagtgggtagctcctctctgcagctggt

SEQ ID NO: 2534 - DNA, 126 bp, homo sapiens
atacacagatattgcatatggatcttactagtttcatccaggcagagcaaatttttcctttatccctaattctatactcctataaaaggctgatacacagatattgcatatggatcttattagttt

SEQ ID NO: 2535 - DNA, 77 bp, homo sapiens
ttagctagacacagagcactgattggcactgactggtgtgtctacaaacctttagctagacacagagaactgattgg

SEQ ID NO: 2536 - DNA, 255 bp, homo sapiens
aaaaaaaaaaaaaaaaagaaacaatgttgttccgtctcaagaaaggaaggaaggaaagaaagaaggaaggagaaagaaggagaaagaaagaaagaaagaaagaaagaaagaaagaaagaaagaaagaaagaaagaaagaaagaaagaaagaaagagaaagaaagaaagaaagaaagaaagaaagaaagaaagaaagaaagaaagaaagaaagaaagagaaggaaggaacgaaggaaagaagaaaagaaagaaaga

SEQ ID NO: 2537 - DNA, 99 bp, homo sapiens
ttagggtttagataaatgtctcattaagaggtaaatgtctcattaaggttattagggttattaggttattagggtttaggtaaatgtctcattaagagg

SEQ ID NO: 2538 - DNA, 90 bp, homo sapiens
tgggaccattagcactgaacagggtacatgaacagagtagaccactgtaagctagaccgtggccaagtgggaccattagcactgaacagg

SEQ ID NO: 2539 - DNA, 102 bp, homo sapiens
actgcaataaaatatcaatggtttttaaaaagaattatacaaatctaaaaatttagttaatctaaaaatgtattgcactgcaataaaatatcagtggttttt

SEQ ID NO: 2540 - DNA, 123 bp, homo sapiens
gaacataaattgtgaagatttcatggacatttgttagttctccaaattaatacttttataatttcttatgcctgtctttactgcaatctctgaacataaattgtgaagatttcatggacattt

SEQ ID NO: 2541 - DNA, 114 bp, homo sapiens
ttttgtagttatccttgtagagatctgtgatggttaatattgagttaactatctgcgatggttcacacttttggtgatgttttgtagttctccttgtagagatctgtgatggtt

SEQ ID NO: 2542 - DNA, 93 bp, homo sapiens
gcaagtacgcctcaaccccttctctttcacccttagcggcaagtcccgcttttctgggagaggggcaagtacgcctcaaccccttctccttca

SEQ ID NO: 2543 - DNA, 85 bp, homo sapiens
gactcctagttccacctccagaccacaatgtggttgaatgtctcttccagggcttgggactcctagttccatctccagaccacaa

SEQ ID NO: 2544 - DNA, 75 bp, homo sapiens
ctaactccacatataatggtgaaagaatatctacaaaaacatccctacagctaactccatatataatggtgaaag

SEQ ID NO: 2545 - DNA, 94 bp, homo sapiens
cccctcaaccccttctccttcatccttagcggcaagtcccactttcctggggcaggggcaagtacccctcaaccccttctccttcacccttagc

SEQ ID NO: 2546 - DNA, 83 bp, homo sapiens
aggcagcaggcagctgcagtgatggctgccgtcccttgcctggggtgctcagttttctaaggcagcaggcagcagcagtgatg

SEQ ID NO: 2547 - DNA, 147 bp, homo sapiens
gatacgaggttggggtacttgcctctcctctagaaaagcgggacttgccgctaagagtgaaggagaaggggttggagtacttgccctgtgcccggaaaagctgagaaggggtagagacaaggagagaaggggttggggtacttgccc

SEQ ID NO: 2548 - DNA, 95 bp, homo sapiens
taacttctgggatacatgtgcagattacagtatttgcaaattgtcattttatatatattatatatttaatgtaagttctgggatacatgtgcaga

SEQ ID NO: 2549 - DNA, 104 bp, homo sapiens
tgaactagataatcatttcaatataatgtacatatacatagtgcattatactggaatgattatctggtttgaactttgaactagataatcattccaatataatg

SEQ ID NO: 2550 - DNA, 111 bp, homo sapiens
ttttttctagtcttatgcttttactgacactgcagtgtaagttttgcccatatatgtatatatatatgtgtagacatttaaattttttctagtcttttgcttttactgaca

SEQ ID NO: 2551 - DNA, 300 bp, homo sapiens
atgcaccaatcagcactctgtgtctagttcaaagtttgtaaacgcaccaatcagcaccctgtgtctagctcaaggtttgtaaaagcaccaatcagtgctctgtgtctagctaatctagtggggacttggagaacttttacctctagctaaaggattgtaaatacaccaatcagcactctgtgtctagctcagggattgtaaacgcaccaatcagctctctgtaaaacggaccaatcagctctctgtaaaatggaccaatcggctctctgtaaaatgggccaatcagcaggatgtgggtgg

SEQ ID NO: 2552 - DNA, 186 bp, homo sapiens
caccaatcagcactctgtgtctagctcaagatttgtaaacatgccaatcagcactctgagtttagctcaaggtttgtaaatgcaccaatcagcactctgtatctagctaatctagtggagacttggagaacttttgtgtctagctcagggattgtaaacgcaccaatcagcaccctgtcaaaacgg

SEQ ID NO: 2553 - DNA, 65 bp, homo sapiens
cttaaagtagttattcttaaagttcccccaagtgggaataacttaaagtggttattcttaaatta

SEQ ID NO: 2554 - DNA, 88 bp, homo sapiens
ataaaatcaccatgttatatggtgatttgaatatattaatcaaatatatttgatttgatatattaataaaatcacaatgttatatggt

SEQ ID NO: 2555 - DNA, 103 bp, homo sapiens
aggaattaatatccagaatatacaaataactcctaaaactcaacaacaacaaaaagcaacctagttcatatatccaataaggaattaatatctagaatataca

SEQ ID NO: 2556 - DNA, 108 bp, homo sapiens
agctagatacagagtgtcgattggtgtatttacaaactctgagctagacacagagtgctgattggtgcatttacaaacctcgagctagatacagagtgccgattggtg

SEQ ID NO: 2557 - DNA, 87 bp, homo sapiens
atttcatacaaattcagaatttttccagaatcaagaggtttcaggaggcatgaaacctcctaatttcatacaaattcagaatttttc

SEQ ID NO: 2558 - DNA, 159 bp, homo sapiens
aagaaatgctcaaaggagttctaaacatgaaaacaaaaagtcaatactcaccatcataaaaacaaacagaagtataaaaactcacaggttttataaatagttttataaaaactcacaggttttataaatagttttataaaaactcacaggttttataaa

SEQ ID NO: 2559 - DNA, 136 bp, homo sapiens
tccaagatgaaagctagtctttattactctgatctaaattattatgtatcttacctgttttttttccttcaacttttattttaagttctggtccaaggtgaaagctagtctttattactctgatctaaattattat

SEQ ID NO: 2560 - DNA, 92 bp, homo sapiens
tctgtgtctagctaaaggtttgtaaacacaccaatcagcactctgtaaaaatgcaccaatcagtgctctgtgtctagctaaaggtttgtaaa

SEQ ID NO: 2561 - DNA, 109 bp, homo sapiens
tgaaaacaactatctatctggctttgagtctatactcaaaaacacatgcctttgctcacatcctgattttcactttgaaaacaactatctacctggctttgagtctata

SEQ ID NO: 2562 - DNA, 98 bp, homo sapiens
cctagtctatatgcctcttttagactatcctagtctatatagactagtctatatagactagtctatatagactatcctagtctatatgcctcttttag

SEQ ID NO: 2563 - DNA, 142 bp, homo sapiens
gtaacccaggacccctagggatggggtggggagagtgacccaggaccctagggatggggtggggagagtgactcagtacccctagaaatgggatgaggtgacagtgacccaggacccctagggatggggtggggagagtgac

SEQ ID NO: 2564 - DNA, 86 bp, homo sapiens
atgtctcaataaagcatgtatatatatatacacacactctcaatattatgtctcaataatgtctcaataaagtatgtatatatata

SEQ ID NO: 2565 - DNA, 101 bp, homo sapiens
gaagtaagatgctggggctcagcacatccctgtaagcaacaacaaatccttataaggaagttaccttccaaggaagtaagatgctggagctcagcacatcc

SEQ ID NO: 2566 - DNA, 127 bp, homo sapiens
atttaaaccaataaatgcatactaatattttaaaaaacatttattggtttaaaccaataaatgtatactaatattttaaaagtttaaaccatgtgttggtttataccaataaatgtatgctaacatt

SEQ ID NO: 2567 - DNA, 74 bp, homo sapiens
gatagctcattttgttgtttaatgatatgtaaatatatatttagaataaatgatagctcattttgttatttaat

SEQ ID NO: 2568 - DNA, 91 bp, homo sapiens
tttacaaacctttagctagacacagagtgctgattggtgcgtttttacagagtgctgattggtgcatttaccaacctttagctagacacag

SEQ ID NO: 2569 - DNA, 112 bp, homo sapiens
tcctcctagaccacaaggaggactgaggaaggtcagatttagtggtccttactgacgcattctcaaaaacctccacccttgcctgtcctcctagaccacaaagaggactgag

SEQ ID NO: 2570 - DNA, 88 bp, homo sapiens
tgtttaatttgtcaaataacacttattttctgatagtaataatagaaacttaaaaggtcttttgtttcatttgtcaaataacacttat

SEQ ID NO: 2571 - DNA, 77 bp, homo sapiens
aaaaattacttttgaatatgagtaattaacttgcacagagcaactggggttaaaaaattacttttgaatataagtaa

SEQ ID NO: 2572 - DNA, 84 bp, homo sapiens
atacaaaaccaccttactcctgcaggaatggccacaatttaaaaaatcaaaaaataatagatacaaaaccaccttactcctgca

SEQ ID NO: 2573 - DNA, 117 bp, homo sapiens
tgaccagttcacacatttgatctctgtttccagaaaggtaagaatgacttctttatttccactctgccaccttcaatataggcctatctgaccaattcacacatttgatctctgttt

SEQ ID NO: 2574 - DNA, 100 bp, homo sapiens
tctatgttggccatgctggtcttgaactcttggcctcaagaaattttcccacctcggcctcatagactctttctatgttggccatgctggtcttgaactc

SEQ ID NO: 2575 - DNA, 129 bp, homo sapiens
gaaacataattgtacatcttttgatactttttaattttttgaatatttgagcttgtggaagtaaactgcgtgaccaaatgtcaaatgaaacataattgtacatcttttgatactttttaattttttgaa

SEQ ID NO: 2576 - DNA, 91 bp, homo sapiens
ggggtacttgcccctcccccagaaaagcagagaaggggtagagacacagagagaaggggttggggtacttgccccttccccagaaaagcag

SEQ ID NO: 2577 - DNA, 89 bp, homo sapiens
tgtgatctttgttggacccttatcagtagttctgcttttgccctttatcctgttccctcagaagcatgtgatctttgttagacccttat

SEQ ID NO: 2578 - DNA, 105 bp, homo sapiens
cctcccacaaccaatcagactggtggcaggccaagtcttcatgtataactttgtaatttcaattcagcctttgatttattgcctcccacagccaatcagactggt

SEQ ID NO: 2579 - DNA, 100 bp, homo sapiens
attctcataatgctttcttctttttattttatttccaatggaaataggtggcccaatttagatcagtgaaaattcgcataatgctttcttctttttattt

SEQ ID NO: 2580 - DNA, 115 bp, homo sapiens
aacttttcattctctttacaatctctaaattctcatgtttttaaggctctcatcttaggccaacttatcttgggtcaccttgctaacttttcattctctttacagtctctaaatt

SEQ ID NO: 2581 - DNA, 98 bp, homo sapiens
gtcatcccaatgtctgctcagctctcagccgagaggagacccacagagggtagcttctctccataggcaggtcatcccaatgtctactcagctctcag

SEQ ID NO: 2582 - DNA, 94 bp, homo sapiens
aggtgggaggatcatttgagcccaggatatcgagaccagcctgcactacaaaaaaatccaaaaaatgaggtgggaggatcacttgagcccagga

SEQ ID NO: 2583 - DNA, 95 bp, homo sapiens
tcctctactggtatacttaagatttggtacattttactacatgaaaaaatattattgatgtatattttaaactcatctactggtatacttaagat

SEQ ID NO: 2584 - DNA, 107 bp, homo sapiens
tgtccccacccaaatctcatgttgcatatagtcatgaatgctggaggtggggcctggttggaggttaatatggtttggattcgtgtccctacccaaatctcatgttg

SEQ ID NO: 2585 - DNA, 96 bp, homo sapiens
aatatgtactgaatatgtgaatgaatgagcaagatttctgtaaaatggagctttagtgcataatatgtactgaatatgtgaatcaatgagcaagat

SEQ ID NO: 2586 - DNA, 113 bp, homo sapiens
ttttgagaagtgtctgttcatgtcctttgcccacttttcaatggggttgtttttttctcataaatttgtttaagtcttctttttgagacgtgtctgttcatgtcctttgccca

SEQ ID NO: 2587 - DNA, 97 bp, homo sapiens
aatgatgtcttagagctgtggccatagagccttctctctctctctctctcacacatacacacacacggataatgatgtcctagagctgtggccatag

SEQ ID NO: 2588 - DNA, 100 bp, homo sapiens
gaccaatcagaggctgaagtgaagttacaaagttacaccctatgcaaatgtctgattggttgcggaaggtgacctatcagaggctgaagtgaagttacaa

SEQ ID NO: 2589 - DNA, 108 bp, homo sapiens
tgccagccatagaagctgcttgcaggatgccccatccagccacagcctcacccaaccttccaggtgccaccatgtccccccgtgccagccatggaagctgcttgcagg

SEQ ID NO: 2590 - DNA, 87 bp, homo sapiens
gatgaaaataaaagccacgtggtgaaaacagttccagccataatggttaatttttgtccaggatgaaaataaaagccacatggtgaa

SEQ ID NO: 2591 - DNA, 78 bp, homo sapiens
tgatgtatgcctttcccccaaggttttggggtattttgatgtatgcctgttttgatgtatgcctttcccctaaggttt

SEQ ID NO: 2592 - DNA, 107 bp, homo sapiens
ttatatatttataaagtttctcaacaggaaatctatagaatcaatagtgcaaaatgggctttaactgtaccatatactttatatatttataaaggttctcaacagga

SEQ ID NO: 2593 - DNA, 119 bp, homo sapiens
caatagcagtagcaatatgtgccagatacatggctaaggagatctatctatctatctctctatctatctatagcaataacaatagcaatagcaatatgtgccagatacatggctaagga

SEQ ID NO: 2594 - DNA, 527 bp, homo sapiens
ttcatactggagagaaaccttacaagtgtaatgagtgtagcaagaccttcaatcagaagtcatcccttcaatgctgtcatagacttcatactggacagaaaccttacaaatgagaagaatgtgacaaagtttacagttgcagatcacaacttgaaacacataggagaattcatactggagaaaaaccatacaaatgtaaggtttgtcacaaggctttctgggataattcatgcctttcacacctgaagagttcatactggagggaaaccttatgagtgtaaggtttgtgacaaggttttctggcatgattcatgccttgcacaacatcagagagttcatactggggagaaaccttacaagtgtaataagtgtggcaagacctttgctcaaaattcaggtcttgtaatgcataaggcatttcataatggaaagaaaccttacacatgtaatgaatgtggcaaggtttttagtcaaaaagcaaatcttgtatgtcattatagatgtcatactggagagaaaccatagaa

SEQ ID NO: 2595 - DNA, 166 bp, homo sapiens
cctccctcccttccttccttccttccttccttccttccttccttccttccttccttctttctttcttccttccttcctctctctctcttctctttctttctttctttctttctttctttctttctttctttctttctttcttttctttctttctttctttctttct

SEQ ID NO: 2596 - DNA, 78 bp, homo sapiens; identical to SEQ ID NO: 2591

SEQ ID NO: 2597 - DNA, 107 bp, homo sapiens; identical to SEQ ID NO: 2592

SEQ ID NO: 2598 - DNA, 119 bp, homo sapiens; identical to SEQ ID NO: 2593

SEQ ID NO: 2599 - DNA, 105 bp, homo sapiens
tagctgcaatttgttaggtagttatgttactgcatgtataggtcatcagaataacaaaattgatattaatataataaatagctgcaatttgttaggcagttatgt

SEQ ID NO: 2600 - DNA, 100 bp, homo sapiens
gtgtatgttgtgcatgtgtgtgtatatatgtatatgtgtgtatgtgtgtgtatgtgtatatgtgtatgtttatgtgcgtgtatgttgtgcatgtgtatgt

SEQ ID NO: 2601 - DNA, 109 bp, homo sapiens
atctccttgtatagaatataaagatattttttatatatatgtgtgtgtgtgtatatatatcttgtatagaatatacaagatctccttgtatagaatataaagagatttt

SEQ ID NO: 2602 - DNA, 116 bp, homo sapiens
gccaggctggtcttgaactcctgacctcaggttttctacccgccttggcctctcaaagtgctgggattataggcatgagccaccatgccaggcctggtcttgaactcctgacctca

SEQ ID NO: 2603 - DNA, 80 bp, homo sapiens
ttactagtatctgtctgtatacaaattccttggcttgtagatggccttctcccttactagtatctgtctgtatacaaatt

SEQ ID NO: 2604 - DNA, 91 bp, homo sapiens
aggggctatttgcagccagaatcctctaatgtaaataaaacataaactttttattatctataaagtcaggggctatttgcagccagaatac

SEQ ID NO: 2605 - DNA, 102 bp, homo sapiens
tttgagaaatctccaaactgcttttcacagtggctgaactaatttcaatcccaccaacagggtatataccttcccttttttgagaaatctccaaactgcttt

SEQ ID NO: 2606 - DNA, 101 bp, homo sapiens
aaaaaaatgctttaaatattatctctttcttaaagttctcttgaaatcgtcatgtgattaggtaacaaagagggaaaaaaatgctttaaatattatctctt

SEQ ID NO: 2607 - DNA, 134 bp, homo sapiens
taccttgtttaaattagaaagtgatactaaacagacaatcagaaaaaatgtatataagggataagaggaaaagtctatactttttttaccttgtttaaattagaaagtgatactaaacagacaatcgaaaaaaa

SEQ ID NO: 2608 - DNA, 124 bp, homo sapiens
aaagcaaggaaagcataaagcaaggaaagcatgaagcaaaaacagcagagatttcttgaacaaggaactggacaaaaagtacaaacaaagcaaggaaagcatgaagcaacaacagcagagattt

SEQ ID NO: 2609 - DNA, 91 bp, homo sapiens
ccttcattcctgttacagctagctgcagccatggtggatgctgcttagccaggagagtaccttaattcctgttacagctagctgcagccat

SEQ ID NO: 2610 - DNA, 130 bp, homo sapiens
atgagattgtaatttttgcactattatgcttttttcctctgttgaaatggctgattatgatgtacaaaaaagtacatcaagcaaaaaccaagtagatgagattgtaatttttgtactattatgctttttt

SEQ ID NO: 2611 - DNA, 105 bp, homo sapiens
gaatccaccacagtctccatttcttgtagatttaagacttaacactaggtctctagtagctgctctctctttccttaaagaatccaccagagtctccatttcttg

SEQ ID NO: 2612 - DNA, 82 bp, homo sapiens
atcagtggatacaaatccagtggaaacacctataaaaattattgatttgtgtacttatcatcagtggataccaatccagtgg

SEQ ID NO: 2613 - DNA, 107 bp, homo sapiens
gagtagagatggtaggacataaaaatagagaaagctacacatgaaggaaggaaagaaacaaagaaagaaacagcagcaaaggagtagagatggcaggacataaaaat

SEQ ID NO: 2614 - DNA, 126 bp, homo sapiens
gattaaggggtaaacgcccttgtgtgtctttgctgaactaggaagctcctgaagcagccgccttccccctgtccctcagaaactggaaccggattaaggggcaaacgcccttgtgtgtctttgctg

SEQ ID NO: 2615 - DNA, 76 bp, homo sapiens
atgtctgcatcaacttttttaaaaatataccaatttaattaattgtttttcatgtctgcatcaacttttttaaaaa

SEQ ID NO: 2616 - DNA, 78 bp, homo sapiens
agatttctatcccaacaaaagttttttcatcattattactatttagaaagcccagatttctatcccaacaaaaatttt

SEQ ID NO: 2617 - DNA, 139 bp, homo sapiens
tcctcttttcaggaggttatctgagtttagaggttctgggtatcattatattaaggatgttgttttctgtaatacctgtattgcataagtaaagattcctctttacaggaggttatctgagtttagaggttctgggtat

SEQ ID NO: 2618 - DNA, 98 bp, homo sapiens
atgctcccatttgtataaaaataaagaagataaaagctatacaaaagtcaaggtatagtacagtgattagaatatgttcccatttgtataaaaataaa

SEQ ID NO: 2619 - DNA, 103 bp, homo sapiens
ttaaaaaaaaccctgcaagcaaacatttacctatgtaacaaacctgcacatcttgcacatgtaccccagaacttaaaatttaaaaaaaaacctgcaagcaaac

SEQ ID NO: 2620 - DNA, 81 bp, homo sapiens
aagttttgaggctatcctgagatatttaggcatatttccccgattttctactgaagttttgaggctatcctgagatattta

SEQ ID NO: 2621 - DNA, 76 bp, homo sapiens
gttttgtttttgaaatggagtctttttttagtggtttttttgttttgttttgttttgtttttgagatggagtcttt

SEQ ID NO: 2622 - DNA, 125 bp, homo sapiens
ataagtgtccatgaaatcttcacaatttatgttcagagattacagtaaagataggcccaagaaattatagaagtattaatttggggaactaataaatgtccatgaaatcttcacaatttatgttc

SEQ ID NO: 2623 - DNA, 150 bp, homo sapiens
tcttctcccctttacttctggactgagaattctatattctcattttacaagtgagtctgtgagccaccacacccggcaacaatgaatttttccagatcttctcccctttacttctggactgagaattctatattctcattttacaagtga

SEQ ID NO: 2624 - DNA, 119 bp, homo sapiens
agaatcatataatcatcttagtatttacaaaatttaaaagttttgacaaaattcaacaaccatttaaactgtcaacaaatagaatcatataatcatctcagtatttacaaaatttaaaa

SEQ ID NO: 2625 - DNA, 75 bp, homo sapiens
aaagactccatctcaaaaacaaaacaaaacaaaacaaaaaaccactaaaaaaagactccatttcaaaaacaaaac

SEQ ID NO: 2626 - DNA, 85 bp, homo sapiens
tgctctctgattacctctgtaaaatcagattacctctgattatactgaagcaagcagcaagtgctctctgattacctctgtaaaa

SEQ ID NO: 2627 - DNA, 73 bp, homo sapiens
gactattaatttccattctatgatcaaaagcaagtggagatttagcatagactattaatttccattctatggt

SEQ ID NO: 2628 - DNA, 130 bp, homo sapiens
aaagaaaagaattttcaaccccgaatttcctatctggccaaactaaaagcaagaagaaagtgggggccaatatccaacattcttaaagaaaagaattttcaacccagaatttcctatctggccaaactaa

SEQ ID NO: 2629 - DNA, 130 bp, homo sapiens; identical to SEQ ID NO: 2628

SEQ ID NO: 2630 - DNA, 102 bp, homo sapiens
tagtggtcagaaaagagaaattcagtctttaaaaactgtagtagtcagaagagagaaaattcagccttcaaaaactatagtggttagaaaagagaaattcag

SEQ ID NO: 2631 - DNA, 117 bp, homo sapiens
ttggctgcaaattataacttttctaacttggggaactcctggtgctgtcagcatttacactacatcagtggctttcaactttggctgcaaattataacttttctaactttgggaact

SEQ ID NO: 2632 - DNA, 109 bp, homo sapiens
agctaatattatcaaatgtaagtatttataatgaaaaatatggcattattagcttaatattttgcttagttttacaaagcagctaatattataaaatgtaagtatttat

SEQ ID NO: 2633 - DNA, 141 bp, homo sapiens
agtattaattttgggaactgataaatgtccatgaaatcttcacaatttatattcagagattgcagtaaagacaggtgtaagaaattataaaagtattaattttgggaactgctaaatgtccatgaaatcttcacaatttat

SEQ ID NO: 2634 - DNA, 70 bp, homo sapiens
tttaaaagatccacaaaaagcatccacaaaaaagcatctactagcttttaaaagatccacaaaaagcatc

SEQ ID NO: 2635 - DNA, 84 bp, homo sapiens
tttgtttttttcttgtaaatttgtttttttcttgtaaattttgtttttttcttgtaaatttgtttttttcttgtaaatttgttt

SEQ ID NO: 2636 - DNA, 105 bp, homo sapiens
gatgcatattgtgacttaaatgtatttagccctcatagtgtttgttttgtattttaagccaacatttaaaaattgatagaggatgcagattgtgacttaaatgta

SEQ ID NO: 2637 - DNA, 98 bp, homo sapiens
ctcccaaagtgctgggattacaggcgtgagccactgtgcctggccttttcttcattttttgatgtgggcatttatctcccaaagtgctgggattacag

SEQ ID NO: 2638 - DNA, 89 bp, homo sapiens
caggagaatcgcttgaacctgggaggttcacacctatagtcccagctacttgagagactgagacaggagaatcgcttgagcctgggagg

SEQ ID NO: 2639 - DNA, 117 bp, homo sapiens
ccttttaacttataaaaatatgtgattttaaccatattaaagcatatctgattttcacatactacaaaaggtatagtatccttttaacttataaaaatatgtgattttaaaccatat

SEQ ID NO: 2640 - DNA, 81 bp, homo sapiens
gacatttgtccaattctctgggcagaagctggaaacagtccagtaggatcaacgacatttgtccaattctctgggcagaag

SEQ ID NO: 2641 - DNA, 95 bp, homo sapiens
taagcagtggaagaaattgaatttcaggtgagccttttttttttttttaatttcttcttttaaaagacctaagcagtggaagaaattcaatttca

SEQ ID NO: 2642 - DNA, 188 bp, homo sapiens
tatgtctagctaaaggtttgtaaatgcaccaatcaggactttgtgtctagctcaaggtttgtaaacacaccaatcggcaccctgtgtctagctcaaggtttgtaaacacaccaatcagtgctctgtgtctagctaaactagtggggacttggagaacttttctgtctagctaaaggattgtaaattca

SEQ ID NO: 2643 - DNA, 95 bp, homo sapiens
agtgattttgttacacaacaactttgtccactttaaggtgtacgggactaggttctttttggttctccaagtgattttgtcacacaacaactttg

SEQ ID NO: 2644 - DNA, 105 bp, homo sapiens
atataaataaatataaatgataccctttgcatatttttattatatatataaataatatatataaaaatatataaataaatataaatgatacccttttgcatattt

SEQ ID NO: 2645 - DNA, 65 bp, homo sapiens
aaaggttttttatatttgctaaggagtaagttttaaatataaaggttttttatatttaaaacctt

SEQ ID NO: 2646 - DNA, 97 bp, homo sapiens
ggacttgccactaagggtgaaggagaaggggttcagggatacttgcccctcccccagaaaagcgggacttgccgctaagggtgaaggagaaggggtt

SEQ ID NO: 2647 - DNA, 94 bp, homo sapiens
cttctatgaacatttgcatataaactatgttctgtttacagaacataaaaaatatattctgtttaatcaacttcaatgaacatttgcatataaa

SEQ ID NO: 2648 - DNA, 90 bp, homo sapiens
tataattatcaaatataagcactattgtctttattactctttacctttgtcatgttgtacacatatataattatcaaatattagcactat

SEQ ID NO: 2649 - DNA, 123 bp, homo sapiens
caaccccactcctgggtatatacccaaaagaaagagaacagtttggaagttccccaaaaaatgaaaaatagagacattatatgatccagcaactccactcctgggtatatacccaaaagaaag

SEQ ID NO: 2650 - DNA, 102 bp, homo sapiens
ttgcccagactggtctcaaactgctttttaatcaactttttttatttttcatttttttgagaaagtcttactatatgttgcccagactggtctcaaactcct

SEQ ID NO: 2651 - DNA, 136 bp, homo sapiens
tttgtccattttacagagtgctgattggtggatatacactttagctagacacagagtgctgattggtgcatttttacagagtgctgattgctgcatttacaatcctttagctagacacagagtgctgattggtgca

SEQ ID NO: 2652 - DNA, 143 bp, homo sapiens
gggggttcttgccccctagaaaagtggtacttgctcctaagggtgaaggagaaggggttgggggttcttgccccccagaaaagcagacaaggggtagagacatggagagaaggagttggggggttcttgccccccagaaaagc

SEQ ID NO: 2653 - DNA, 89 bp, homo sapiens
cccttgggggtgtaactgtagacagtgttgggtaggggcttttgactttgctctataacccttgggggtgtaactgtagacaatgttgg

SEQ ID NO: 2654 - DNA, 131 bp, homo sapiens
ttctatcaacaaaatctattttatctgtaaaccataataaagctgttgtctctgtgtgtgtgcgtgtgtgcgtgtgtctctgtgtgtgtcttctatcaacaaaatctactttatctgtaaaccataataaa

SEQ ID NO: 2655 - DNA, 83 bp, homo sapiens
taactttgattacccctgtaactttgattattagtttgattacaacattgattaatattaactttgattacccctgtaacttt

SEQ ID NO: 2656 - DNA, 93 bp, homo sapiens
gggctacagagtgagactctgtctcaaaacaaaaacaaaaaacaagcaaacaaaaaaaacactcgggctacagagtgagactccgtctcaaaa

SEQ ID NO: 2657 - DNA, 100 bp, homo sapiens
tttctaactttctcagagctaagagcaaagcctaagagcaaagttagaaagtgtatttccctacactttctaactttctcagagctaagagcaaagccta

SEQ ID NO: 2658 - DNA, 97 bp, homo sapiens
acccactccagggcctcctctctgctgagaactgggggcacaatgagaggacctgcctgcagagaggagctacccactccagggtctcctctctgct

SEQ ID NO: 2659 - DNA, 118 bp, homo sapiens
taagaaattataagagtattatttgggaagtgacaaatgtctatgaaatcttcacaatttatgttcagagattgaagtaaagacacgggtaagaaattataaaagtattatttgggaa

SEQ ID NO: 2660 - DNA, 97 bp, homo sapiens
actctgttagcttcagactttcaggaaagactttttggaatgtcttagaatgtagtgtcagtactacactctgttagctttagactttcaggaaaga

SEQ ID NO: 2661 - DNA, 250 bp, homo sapiens
aaccacaatgtcctgcagtttattcattcaatgaatgaataaacaaccacaattaattcaatgaatgaataaacaaccataatgtcctacaatctgcacacagatgtttgaagcagttttatttataattgccaaaagttggaaaaaaccacaatgtcctacagtttattcattcaatgaatgaataaacaaacatgattcattcaatgaatgaataaacaaccacaatgtcctacagtttattcattca

SEQ ID NO: 2662 - DNA, 97 bp, homo sapiens; identical to SEQ ID NO: 2660

SEQ ID NO: 2663 - DNA, 145 bp, homo sapiens
ctgcctacacacaatataagctatgatgtttttctttcaattaatataaaaacctcatttttatttgaaataacaacatcataacttatactgtgtgtcagctgcctacacacaatataagctatgatgtttttatttcaattaa

SEQ ID NO: 2664 - DNA, 70 bp, homo sapiens
ctgttctaagaagaggaagtaaagtaactcaatttttaatgtgagttctgttctaagaagaggaagtacc

SEQ ID NO: 2665 - DNA, 93 bp, homo sapiens
tgctctgtgcctggctcacccttggcaggcatgggatacaggccggtagcacaagccaagtgctctgtgcctggctcacccttggcaggcatg

SEQ ID NO: 2666 - DNA, 115 bp, homo sapiens
cccaagaacccacaacagcccctggaccctgctgactggaatagttgtgctcaccgatgcagtagcagaaacacctcttacccaagaacccacaacagtccctggaccctgctga

SEQ ID NO: 2667 - DNA, 75 bp, homo sapiens
ggagaggatgaagtaaagttacaaagtcgtttgcttggcctgctccctacggagaggatgaagtaaagttacaaa

SEQ ID NO: 2668 - DNA, 95 bp, homo sapiens
tctcctcagctctcagcagagaggaaaacctggggtgggtaactcttctctgcagctggtcatctcattgtcccctcagctctcagcagagagga

SEQ ID NO: 2669 - DNA, 95 bp, homo sapiens
catatttctttatcattttgtccattgataactatttcaaatagtatttaattatatatacatataccatatttcctttatcattttgtccattg

SEQ ID NO: 2670 - DNA, 103 bp, homo sapiens
ctgctgtataacagagaatatatataaaaaaatatataatgagggcaggcattgtacacttaaaatgttgctaaaatctctgctgtacaacagagaatatata

SEQ ID NO: 2671 - DNA, 101 bp, homo sapiens
ttgcagctataactcattttggcttaggggaacgtcccttttgattggttgaagtttcaatcccttagcttgcagctatgactcattttggcttaggggaa

SEQ ID NO: 2672 - DNA, 81 bp, homo sapiens
caacttttcatttcattaatcctttattttttttagtctccattttgaaaaaaacaacttttcacttcattaatcctttat

SEQ ID NO: 2673 - DNA, 100 bp, homo sapiens
agaatgaacagacaacctgtggaatgggacgaaagaacttaataagaatttgcacagtgaagtaaataattaaaagaatcaacagacaacctgtggaatg

SEQ ID NO: 2674 - DNA, 75 bp, homo sapiens
aatgtcatcagttaaggcaggaacaggccattttcacttcttttgttgtggaatgtcatcagttaaggcaggaac

SEQ ID NO: 2675 - DNA, 85 bp, homo sapiens
tcatcccagatactgaactcatagagttggtgaaatgtacatggagactgaaagttcatcccagatactaaactcatagagttgg

SEQ ID NO: 2676 - DNA, 106 bp, homo sapiens
atcaacagtatttgtatccattttctggccatacatcgtatttgctattctggtcaggagcttcacaaaaactgtgaacaaatcaacagtatttgtattcattttc

SEQ ID NO: 2677 - DNA, 75 bp, homo sapiens
gttcctgacttaactgatgacattccaccacaaaagaagtgaaaatggcctgttcctgccttaactgatgacatt

SEQ ID NO: 2678 - DNA, 75 bp, homo sapiens; identical to SEQ ID NO: 2677

SEQ ID NO: 2679 - DNA, 71 bp, homo sapiens
attatgtataattgtcaaacattaaatttgtacagttatgtaaatttgattatgtacaattgtcaaacatt

SEQ ID NO: 2680 - DNA, 103 bp, homo sapiens
acttgcagctaagggtgaaggagaaggggttgaggggtaattgtccctcccccagaagagcgggacttgccgctaagggtgaaggagaaggggttgaggggta

SEQ ID NO: 2681 - DNA, 114 bp, homo sapiens
atggtcttaccatacccctatcaccctgtcttcatgaaatttgatggtcttaccatacccctatcaccctgtcttcatgaaatttgatggtcttaccatacccttatcaccctg

SEQ ID NO: 2682 - DNA, 127 bp, homo sapiens
ctgaagaatcagacactatattttggagaattattcaaagataaatattgcaattagttcaaagataaaataattcttcagattgtacctgaagaatcagacactatattttggagaattagttcaa

SEQ ID NO: 2683 - DNA, 101 bp, homo sapiens
tttaaatcaaatcagtcatacaaaagtaaagaaaaaagaattttaaaaatgaacaaaaatgttttttaaatcaaattagtcatacaaaagtaaagaaaaaa

SEQ ID NO: 2684 - DNA, 261 bp, homo sapiens
aatgcaccaatccgcactctgtatctagctcaaggtttgtaaatgcgccaatcagcactctgtgtctagctcagggtttgtaaatacaccaatcgacactctgtatctagttaatctagtggggacttggagaacttttgtgtccagctcagggattgtaaacgcaccaatcagcaccctgtcaaaacgcaccaatcagctctttgtaaaacagaccaattggtgctctgtaaaatggaccaatcagcaggatgtgggtgg

SEQ ID NO: 2685 - DNA, 78 bp, homo sapiens
attaactgttaataacaattaaatgttaataacattaactgttatttattttattttataattttattaacaataaaa

SEQ ID NO: 2686 - DNA, 89 bp, homo sapiens
aataaaagatagtctattatagataatagactaataaaagtaaaataaaaagactaataaaagtaaaataaaagatagtctattataga

SEQ ID NO: 2687 - DNA, 102 bp, homo sapiens
aattttctgagaatgttacagcaataatcttgaaacaatacaagtcttgaaacaaggaatttagatatagaaaagaattttctgagaatgttatagcaataa

SEQ ID NO: 2688 - DNA, 144 bp, homo sapiens
aggctggagtgcagtggcgcgctctctgctcactgcaagctctgcgccccaggttcacaccattttttttttttttccagacagagtctcgctctgtcacccaggctggagtgcagtggagcgctctctgctcactgcaagctc

SEQ ID NO: 2689 - DNA, 91 bp, homo sapiens
tacaattatttcacagtaacatatagaaatgttattgtattttataatttctgtatatagtacaattatttcacagtaacatacagaaatg

SEQ ID NO: 2690 - DNA, 122 bp, homo sapiens
ataaatgcccatgaaatcttcacaatttatgttcagagattgcagtaaagacaggtgtaagaaattataaaagtattaattttgggaactgataaatgtccatgaaatcttcacaatttatg

SEQ ID NO: 2691 - DNA, 101 bp, homo sapiens
taacagaaagaagaaaaatgagaggaataaaggagaaaaaagaaagaaagaaagaaagaaagaaagagaaagaaagaaagaaagaaagaaaaagaaagaga

SEQ ID NO: 2692 - DNA, 83 bp, homo sapiens
ctaaacagagaaacatgttagttaccatttctgtcttactatcaatatctagttgtcactaaacagagaaacatgttagttac

SEQ ID NO: 2693 - DNA, 86 bp, homo sapiens
atcttcagacatctaaaattgtaactggaggattacaattgtaactggaaaattattttaatcttcagacatgtaaaattgtaact

SEQ ID NO: 2694 - DNA, 80 bp, homo sapiens
ttacaaagttcacatcagtctgaaacaaacattttatttttttaagctttagaacttacaaagttaacatcagtctgaaa

SEQ ID NO: 2695 - DNA, 114 bp, homo sapiens
gagggcttttagtaagaaaatggatgagctaaaggaatggacaagattgaaatttaggataaggaagtggcagaggagggcttttagcaagaaaatggatgagctaaaggaatg

SEQ ID NO: 2696 - DNA, 87 bp, homo sapiens
ctgcttttcttggggaggggcaagtaccccaaccccttctctccgtgtctataccccttctctgcttttctgggggaggggcaagta

SEQ ID NO: 2697 - DNA, 92 bp, homo sapiens
tttatgtatatgtacactgggcattttaatttgaagttcatgttagtatctaaagtgtaacaggatttatgtagatgtacactgggcatttt

SEQ ID NO: 2698 - DNA, 137 bp, homo sapiens
tcgtattagaaatttcttgcctatccttttctgcaggcttattgaggctcaatttttcatattagaaatttcttgcctattattccttgggggacttgttaaggctcaatccttcatattaaggatttcatgcctat

SEQ ID NO: 2699 - DNA, 110 bp, homo sapiens
acctcctaatactatcacatcgggatacagactgtcatcttctgtctataattgcctcccaaagactccacctcctaatactatcacattgggatacagactgtcatctt

SEQ ID NO: 2700 - DNA, 140 bp, homo sapiens
actgttttgtggatactggcagaagacacaggactcttgggtcagagacaaaagacttcagcactcatgggattgaagttagcctgctactgttttgtggatactggcagaagacacaagactcttgggtcagagacaaa

SEQ ID NO: 2701 - DNA, 90 bp, homo sapiens
atgttattattgataaggacttatgtatgataagtctatgtattttgattggagagtttacagtcaatgttcttattgataaggacttat

SEQ ID NO: 2702 - DNA, 133 bp, homo sapiens
gaacataaattgtgaagatttcatggacatttatcagttcccaatattaatacttttataatttcttatgcctttctttactgcaatctctgaacataaattgtgaagatttcatggacatttatcacttccc

SEQ ID NO: 2703 - DNA, 98 bp, homo sapiens
agagttgattaagacactaggaaatatgcactagggagagggggatattttgcagatggctagaatagtcatcttagagttgattaagacactgggaa

SEQ ID NO: 2704 - DNA, 124 bp, homo sapiens
ttcattcagttcacaaagagatccatttaaagactttacaacgtacgtacactcatatgtgttagaggcactttcagtttggccttcattcagttcacaaagagatccatttaaagactttaca

SEQ ID NO: 2705 - DNA, 72 bp, homo sapiens
tcttttaattttatatttgcttttataatgaatttctaatgtaattttgtcttttaattttatatttccttt

SEQ ID NO: 2706 - DNA, 125 bp, homo sapiens
ataagtgtccatgaaatcttcacaatttatgttcagagattgcagtaaagacaggcataagaaattataaaaatattaatttggagaactaataaatgtccatgaaatcttcacaatttatgttc

SEQ ID NO: 2707 - DNA, 73 bp, homo sapiens
aaataaaacattcttgtcagaaaatacataaataaataaataaataaataaataaaacattcttgtcaaaaaa

SEQ ID NO: 2708 - DNA, 98 bp, homo sapiens
ttttatatggaggatttaagcaaaggattaatacatttttaaggatttatacattctttatctgtgttacacaattttatatggatgatttaagcaaa

SEQ ID NO: 2709 - DNA, 111 bp, homo sapiens
tattgactcttttccttctatcttctgaccacaatgtcatctttgagcctgaactgggtgtttgggcctatgtattgactctttcccttctatcttctgaccacaatgtca

SEQ ID NO: 2710 - DNA, 138 bp, homo sapiens
catgaatctggatccaaaaaaaaaaaaggatgctcagttgaatgaatttggaggtggaggcaagtgtctgataatctaattagatggtcatgaatctggatccaaaaaaaaaaaaggatgctaagttgaatgaatttg

SEQ ID NO: 2711 - DNA, 87 bp, homo sapiens
agatggtgaaaagcagcaccgtggataattcaatacagaaataaggaaagataagacatagatggtgaaaagcagcaccgtagataa

SEQ ID NO: 2712 - DNA, 82 bp, homo sapiens
tgtgggcaagtttggaacttcctagagacttggagggctcagaagacaagaaggtgtgggaaagtttggaacttcctagaga

SEQ ID NO: 2713 - DNA, 112 bp, homo sapiens
cctgtaatcccagcactttaggaggccaaggtgggtggatcattgaggtcaagagtttggggccgggcacggttgctcacacctgtaatcccagcactttgggaggccaagg

SEQ ID NO: 2714 - DNA, 264 bp, homo sapiens
tgttgaagaagaaggaaaaatgaaggtatccatcatgatcctaattaccaccaatgaaggtaattagggaaattactcagtaaatgttgttgaggaagaaggaaaaatgaaggtatccatccccttatcagtagttctgcttttgccctttgccttgtgatctttgttgtacccttattggtagttctgctttttgcactttgtcctgttccctcagaagcatgtgatctttgttagccccttattagtagttctgctttttgc

SEQ ID NO: 2715 - DNA, 99 bp, homo sapiens
ctcttttggagatcgcctattatctacacaaggaatgattcctagtgccattgaccactaataaaagacagttttgctcttttggagattgcctattat

SEQ ID NO: 2716 - DNA, 74 bp, homo sapiens
aatctagacatttaaaatgaataatctggacatttaatctagacatttaaaatctagacttttaaaatgaataa

SEQ ID NO: 2717 - DNA, 103 bp, homo sapiens
actctcaggcagaaatccagacattcaagccaccccacccttcgtagacacagatcatagcactggaccctctttgctccatgcccaggcagatctccaggca

SEQ ID NO: 2718 - DNA, 86 bp, homo sapiens
tatcctctccatttacatagggcatacaccgagtaaatgactttgtaactttactgtatcctcttcatttacatagggcatacacc

SEQ ID NO: 2719 - DNA, 111 bp, homo sapiens
taattcttgtattttaatagagacagggttgaccatctcagcctctgagtagctgagattacaggcacccaccatcatgcccggctaattcttgtattttaatagagacag

SEQ ID NO: 2720 - DNA, 194 bp, homo sapiens
gtctagctaaaggattgtaaatgcaccaatcagcactctgtgtctagctaaaggattgtaaacgcaccaatcagcactctgcgtctagctaaagggttgtaaatgcaccaatcagcgctctgtgtctagctaatctggtggggacttggagaacttttgtgtctagctaaaggattgtaaatgcaccaatcagc

SEQ ID NO: 2721 - DNA, 121 bp, homo sapiens
gatgtcctctatgaataagcatttgtagacacaaattaaatagctataagactaatgtgtcttccaaggcaggaagatgtcctctatgaataagtatttgtagacacaaattaaatagcta

SEQ ID NO: 2722 - DNA, 133 bp, homo sapiens
tgtgctattccacatctcttcctactatatgatagtgtgctgctgcgtatctctttctactgtatgatagtgtgctgtgcttatctctactatatgatgttgtgctgcagcgtatctctttctactgtatgat

SEQ ID NO: 2723 - DNA, 421 bp, homo sapiens
gtgggcctgtggctgagctgtatgtgtgtgtgtgggagtgtgcgagagagaggagccagggacaaggagagagacccttgtgggcctgtggctgaggtgtatgtgtgtgagagagagtgagagagacaaagagacagacagactctggtgggcctgtggctgagatgtgtgtttgtgagtgcgagagagcagacagggacaaagagagagacctttgtgggcctgtggctggttgtgtgtgtttgtgtatgtatgagagacaagagagactcttgtgagcctatgactgaggggtgtgtgtgtgtatgtgtgcatgttgagagagaccctggtgagcctgtggctgagttttgtgtgcgtgtgtgtgtgtgagagagagaccgagaccgttgtgggtttgtggctgagttttgtgtgagag

SEQ ID NO: 2724 - DNA, 181 bp, homo sapiens
atacacacatatgtctatatacatatataaacatacatagagatatgtatacatgcacatgtatacacatgtaaacatacatagagctgtgcatacatgcacatagagttatgtatacatgcacatcactatgtatgtttatatatggagagattatatatatatatttatatatgaagag

SEQ ID NO: 2725 - DNA, 113 bp, homo sapiens
atttttgtatttttagtagagacggggtttcaccatgttgcccaggctggtctcgaactcctgacctctaccacgcctggctaatttttgtatttttagtagagatggggttt

SEQ ID NO: 2726 - DNA, 115 bp, homo sapiens
aaaacagatacatagaccaatggaacagaacagaggcctcaggaataatgccatacagcatggtgctggtaccaaaacagttacatagaccaatggaacagaacagaggcctcag

SEQ ID NO: 2727 - DNA, 97 bp, homo sapiens
gattggtgcgtttacaatcctttagctagacacagagtgctgattggtgtgtttttacagagtgtggattggtgtgtttacaatcctttagctagac

SEQ ID NO: 2728 - DNA, 95 bp, homo sapiens
tccagggtctcctctctgctgagagccgaacacccagtgggatgaccagctgtggagaggagatgcccattccagggtctcctgtctgctgagag

SEQ ID NO: 2729 - DNA, 91 bp, homo sapiens
tataggaattatgggagtacaaatcaaagattcaacttatcttccaccctgtctctccaacagcttataggaattatgggagtacaaatca

SEQ ID NO: 2730 - DNA, 99 bp, homo sapiens
gattcttaagagaaaatttaccaacatgtaaataagtgttttctgaatatttggttttttgagtcaaattgattcttaagagaacatttaccaacatgt

SEQ ID NO: 2731 - DNA, 117 bp, homo sapiens
gagaatgtgtcggtaagggccactaaatccaatttttcttggtcctctttgtggtctaggaggacaggcaaggttgcaggtttttgagaatgtgtcagtaagggccactaaatccaa

SEQ ID NO: 2732 - DNA, 128 bp, homo sapiens
cagtagttctgcttttgccctttgccttgtgatctttgttggacccttatcagtagcagtagttctgcttttgccctttggcctgttccctcagaagcatgtgatctttgttctgctttttgcccttt

SEQ ID NO: 2733 - DNA, 158 bp, homo sapiens
caccaatcggcactctgtatctagctcaaggtttgtaaatacaccaatcagcaccctgtgtctagctcagggtttgtgaatgcaccaatcgacactctgtatctagctactctggtggggccttggagaacctttgtgtccacactctgtatctagct

SEQ ID NO: 2734 - DNA, 127 bp, homo sapiens
atttgccaaaaacattgccaaaacatgtgatctatataacagcgtattgagataatttaccaaaaacattgccaaaacattgccaaaaacattgccaaaaacattaccaaaaacatttgccaaaaac

SEQ ID NO: 2735 - DNA, 106 bp, homo sapiens
ttaattttgttatttgtggtagttatatactataatatataacagtatataacagtatataaacaaaatagttaattttgttatttgtggtagttatatactataa

SEQ ID NO: 2736 - DNA, 101 bp, homo sapiens
cctctgttgaaaacagcaatataaatgtgtgtgtatacatatatatgtattgtatatatgtatatatttactatatctcctatgttgaaaacagcaatata

SEQ ID NO: 2737 - DNA, 80 bp, homo sapiens
aaactttggaacttcctagagacttggggagctcagaagacaggaatatgtggcaaagtttggaacttcctagagacttg

SEQ ID NO: 2738 - DNA, 93 bp, homo sapiens
ctgcaggcaggtcatcctgacaagtgtccagttctcagcagagaggagacccacagtgtgtagctcctttctgcaggcagatcatcctgacaa

SEQ ID NO: 2739 - DNA, 338 bp, homo sapiens
gataccactttgatagcttgaaatcagtcatggtaggagtacttcaatcatggtaatggtatcaaaggataccacgttgatagcttgaaatcagtcatggtaggagtagtttgtttgtaagatgctaggtttgtttggataagatgctaggtttgtttgtaagatgctaggttaggttgggaatttgtttatttgtttataagatgctaggtttataagatgctacacttgtttgtttgtaagatgctaggttatagggtaatttgttatgcagcagtgggtaactgcgatggttgatattgagtgtcaacttgattggattgaaggatgcaaagttt

SEQ ID NO: 2740 - DNA, 160 bp, homo sapiens
ttttactttttgttaattgttacctagtattttgttgttgttggtaattgttacctagtgttacctgttttttttttgttgttgttgttgttgttaattgttacctggttttttttctcacattgtgttacggttttgtaggtcttgtgaattctaagct

SEQ ID NO: 2741 - DNA, 79 bp, homo sapiens
tgaaggcaattttggcatttctacagcattcagtataagctattgtcattattaagtgaaggcaattttgccatttcta

SEQ ID NO: 2742 - DNA, 75 bp, homo sapiens
agattagctagatacagagtgtccacacaaaggttctccaaaagtccccaccagagtagctagatacagagtgtc

SEQ ID NO: 2743 - DNA, 88 bp, homo sapiens
ggcataggtttttgtctacaaggtgggagacaatgaactccttcttcatttacccccaggtgcatggcataggtttttatctacaagg

SEQ ID NO: 2744 - DNA, 88 bp, homo sapiens
ttgcttaaaagagcttgacccctcacctctctctctctttctgagttcactggagatctcattgcttaaaagggcttgacccctcacc

SEQ ID NO: 2745 - DNA, 96 bp, homo sapiens
ctatcatataaaagggcagttggagacattatgctttaacaagcctaatatcatgaatttatcattgtacaactatcatataaatgggcagttgga

SEQ ID NO: 2746 - DNA, 108 bp, homo sapiens
attcattatacaatgaatacaatatatattcattgtatgtatattcatatacaatgaatacaatatatattcattgtatgtatattcatatacaatgaatacaatata

SEQ ID NO: 2747 - DNA, 123 bp, homo sapiens
tgtgcctgtagtcccagctacttgggacttgtaggctgtgcctgtagtcccagctacttgggactgcagtacttgggacatgtagtacagggcatgtgcctgtagtcccagctacttgggact

SEQ ID NO: 2748 - DNA, 75 bp, homo sapiens
gttcctgccttaactgatgacattacaccacaaaagaagtgaaaatggcctgtttctgccttaactgatgacatt

SEQ ID NO: 2749 - DNA, 121 bp, homo sapiens
ccactcgacccaggaagtccagctggcttcacctctcaatctttacaatcctttagctagacacagaaaagttatgcaagtccccacttgacccaggaagtccagctggcttcacctctca

SEQ ID NO: 2750 - DNA, 92 bp, homo sapiens
ctctttgtggtgcataaattttagaaaaacctggccaggcgcagtggctcatgcctgtagtggctcacactctttgtgttgcataaatttta

SEQ ID NO: 2751 - DNA, 129 bp, homo sapiens
ttattcttttgcttatggcaaaaaaatcttgatattaaaataccagttcagataggaagaataaactacaggcaagtccataagttattcttttgctcatggcaaaaaaatcttgatattaaaatacca

SEQ ID NO: 2752 - DNA, 112 bp, homo sapiens
aagaacccggattttcctacaacaaagataacccctcacccttcaaagtgtctgcgtgcctaatctttcctggtcatgtgataagaacctggattttcctacaacaaagata

SEQ ID NO: 2753 - DNA, 79 bp, homo sapiens
ggaaagtaatatactccacagtccgtatattagatcggactaataaaaataaatatggaaagtaatatattccacagtc

SEQ ID NO: 2754 - DNA, 95 bp, homo sapiens
agctgcctgacacaacatatatccttaaacacttaggatattccacttttatcagtggtactataatacactagctgcctgacacaacatatatc

SEQ ID NO: 2755 - DNA, 108 bp, homo sapiens; identical to SEQ ID NO: 2484

SEQ ID NO: 2756 - DNA, 94 bp, homo sapiens
caattaagaaatatcaactttaatacaagtttactattgcttattctaatattaaaataagattatgcaattaagaaatatcaactttactaca

SEQ ID NO: 2757 - DNA, 84 bp, homo sapiens
tattatgtataagttatatataacatatacattttacaaaaatattaagttatacatgtattatgaataagttatatataacat

SEQ ID NO: 2758 - DNA, 68 bp, homo sapiens
tagcactaaataatattctattgatatagatatcactatatctatatcactaaataatatagcactaa

SEQ ID NO: 2759 - DNA, 98 bp, homo sapiens
atgatgttatctttggagtaaattaaaagaactaaagtataataaataataaatcataaataatcaatgatgttatctttggagtaaattaaaagaac

SEQ ID NO: 2760 - DNA, 106 bp, homo sapiens
atatctcgttatgtatgtgcaaatattgccaaatcaaaaaaaaagtccccaatccaacacacttctagtcctacccaaaatatctcattatgtatgtgcaaatatt

SEQ ID NO: 2761 - DNA, 105 bp, homo sapiens
tctcatcctggaactcttattgtttctagtactgtttttatttcttattcatcttatttcaagtattgttttctttgttctctcatcctggaactcttattattt

SEQ ID NO: 2762 - DNA, 122 bp, homo sapiens
aaactataaactacttcttatctttctgagataactctttctcctaagaagaaaatgtgaatatttaaatatttaacaaacagttgaaaccaaactataaactacttcttatctttgtgaga

SEQ ID NO: 2763 - DNA, 93 bp, homo sapiens
acttatttctcctgtaaccatgttctttattacatttacattgtttacttttcttttttttattattttacttatttctcctgtgaccatgtt

SEQ ID NO: 2764 - DNA, 137 bp, homo sapiens
tgttcagctatgcaatgcatatatttacataatctttaaacttattgtgtgtgtgtgtgtatatatatatatatatctttaaccttaatcttattcagtgttcagctatgcaatgcatatatttacataatctttaa

SEQ ID NO: 2765 - DNA, 112 bp, homo sapiens
gatcacctgaggtcaagagttcaagactggccgagcacagtggctgaagcctgtaatcccagcactttgggaggccgaggcgggtggatcacctgaggtcaggagttcaaga

SEQ ID NO: 2766 - DNA, 108 bp, homo sapiens
catttttgttttaggatattttctcacatttattttgattatttcaataccattgaaatagaatagaatttaccatttttgttttagaatattttctcacatttattt

SEQ ID NO: 2767 - DNA, 83 bp, homo sapiens
gggtggaataggaggctacattggacaccctggacaaaatggcgacactccgacacaccagggtggaataggaggctatattg

SEQ ID NO: 2768 - DNA, 95 bp, homo sapiens
gaacaatgagaacacttggacacaggaaggggaacacatggacatgagaacatgaacaggaacatgaacaggaacaatgagaacacatggacaca

SEQ ID NO: 2769 - DNA, 107 bp, homo sapiens
tgaccaagagttaacacacagaaagaagatacgtgttcgaggatgaaaatagttacagtaagaacagatgaactagtgaccaagagttaacgcacagaaagaagata

SEQ ID NO: 2770 - DNA, 93 bp, homo sapiens
atattatgttatatatctttctgtatatatttattctattctaaggcaacccaggaattcatattatattatatatctttctgtatatattta

SEQ ID NO: 2771 - DNA, 80 bp, homo sapiens
aaagtttggaacttcctagagacttggagggctcagaaggcaggaagatgtggcaaagtttggaacttcttagagacttg

SEQ ID NO: 2772 - DNA, 110 bp, homo sapiens
ataggatcttccatgacctctggtccaagcagttctgccccatggctaagtgccaactatgacttcaatataggatcttccatgacctctggtccaagcaggtctgcccc

SEQ ID NO: 2773 - DNA, 87 bp, homo sapiens
ggtacttgcccctgccccagaaaaacagagaaggggtagagacaaggagagaaggggttgaggggtacttgccccttccccagaaaa

SEQ ID NO: 2774 - DNA, 117 bp, homo sapiens
ctgtaccccaataacttatggaaaaataaaattaaaaaaataaaaaaattaaataaaaaaaagaatttgttgtaacgaaatgcaatctgtaccccgataacttatggaaaaataaaa

SEQ ID NO: 2775 - DNA, 108 bp, homo sapiens
aagaagcaacagaacacaccataaaggtgggtgggtgatctcatgagttttcaggcttcagaagacataattattttcaatcaagaagcaacagaacactccataaag

SEQ ID NO: 2776 - DNA, 118 bp, homo sapiens
attttataattgctatatgctgtctacatatagcaattatacaatataaattatacaattatagcaattatacaatataaattatacaattttataattgctatatgctgtctacata

SEQ ID NO: 2777 - DNA, 123 bp, homo sapiens
gtgcttaaggtaatggatacatacctcatttagtctgatgtggttattatgcttgaggtaatggatacataattaccattgtgtatccattaaaggataaatgcttgaggtagtggatacata

SEQ ID NO: 2778 - DNA, 130 bp, homo sapiens
caaaagaggccaccagttccagggactcttggaggacccaagagtagagaggcaatttggaaactgaaagaaaggctaaattgaccattacgcaaaagaggccaccagttccagggacttttggaggacc

SEQ ID NO: 2779 - DNA, 82 bp, homo sapiens
attttaaaattaatgacaataaatgaatttaaaaataaatgaattaaaaaatctattttaaaattaatggcaataaatgaat

SEQ ID NO: 2780 - DNA, 91 bp, homo sapiens
ggagaatagtttgaacctgggaggtggagtttgcaatcccagctaatctggaggctgaagcaggagaatagtttgaacctgggaggcggag

SEQ ID NO: 2781 - DNA, 116 bp, homo sapiens
taacttcacttcagcctctgattggttgctgtcctcaaccattgattgtgggccaagtctttgtttgcatagaagtgcaactctgttaacttcactttagcctctgattggttgct

SEQ ID NO: 2782 - DNA, 81 bp, homo sapiens
ctgaaatacaacttttatcatcagatcacctgtctgatctaatctgtctgatctgtctgaaatacaacttttaccatcaga

SEQ ID NO: 2783 - DNA, 147 bp, homo sapiens
ggaggattgcttgaggccaggagtttgaaaccagcctgagcaactaagtgagactctctctccacaaaaaataaaataaaattagccaaggtggaggattgcttgaggccaggagtttgaaaccagcctgagcaactaagtgagact

SEQ ID NO: 2784 - DNA, 99 bp, homo sapiens
gttttaagatgcaggatattatagcttcttttcctgttgatggtttgacagggaaaattaatcagaacattcgggttttaagatgcaggaaattatagc

SEQ ID NO: 2785 - DNA, 94 bp, homo sapiens
cactttttaatatcataccttgttgattaggtgaaaggcctctagtcacctcccaaaggcctcactttttaatatcataccttgatgattaggt

SEQ ID NO: 2786 - DNA, 136 bp, homo sapiens
atatataaatacatatttatacataatatttatgtatttatatatgtataaatatatatggtgataatatataaatatacttatttatatatcatatttatataatatatataaatatatatggtgataatatata

SEQ ID NO: 2787 - DNA, 78 bp, homo sapiens
ctgcttgtttagactatagaaatgaatgactatattcaatgtatttgcatgactgcttgtttagactatagaatgaag

SEQ ID NO: 2788 - DNA, 190 bp, homo sapiens
aatacaccaatcagcactctgtatctaactcatggtttgtaaatgcaccaatcaacactctgtatctagctcagggtttgtaaatacaccaattagcactctgtatctaactaatctagtggggacttggagaacttttgtgtgtagctcagggattgtaaacgcaccaatcagcaccctgtcaaaatgg

SEQ ID NO: 2789 - DNA, 79 bp, homo sapiens
agtctccaggaagttccaaactttcctgcatcttccgtcttctgagccctccgagtctctaggaagttccaaactttcc

SEQ ID NO: 2790 - DNA, 75 bp, homo sapiens
gttcctgccttaactgatggcattccaccacaaaagaagtgaaaatggcctgttcctgccttaactgatgacatt

SEQ ID NO: 2791 - DNA, 75 bp, homo sapiens
gttcctgccttaactgatgacattccactacaaaagaagtgaaaatggcctgttcctgccttaactgatgacatt

SEQ ID NO: 2792 - DNA, 78 bp, homo sapiens; identical to SEQ ID NO: 2787

SEQ ID NO: 2793 - DNA, 190 bp, homo sapiens; identical to SEQ ID NO: 2788

SEQ ID NO: 2794 - DNA, 79 bp, homo sapiens; identical to SEQ ID NO: 2789

SEQ ID NO: 2795 - DNA, 75 bp, homo sapiens; identical to SEQ ID NO: 2790

SEQ ID NO: 2796 - DNA, 75 bp, homo sapiens; identical to SEQ ID NO: 2791

SEQ ID NO: 2797 - DNA, 110 bp, homo sapiens
agttaaccttgtaaatgtgtaattgctgaaagataacattgtaaatgtataattataaatgtgtaacatatgaaatatgtaatttagttaacattgtaaatgtgtaattg

SEQ ID NO: 2798 - DNA, 88 bp, homo sapiens
tccttcacccttagcggtaagtcccgcttttctaggggaggggaaagaacccctcaaccccttctccttcacccttagcggcaagtcc

SEQ ID NO: 2799 - DNA, 79 bp, homo sapiens
aaaatgtgggaaagtttggaacttcttagaaacttggaggactcagaagacaggaagatgtgggaaagtttggaacttc

SEQ ID NO: 2800 - DNA, 235 bp, homo sapiens
ttgtgaatgcaccaatcagcactctgtattctagttcaaggtttgtaaatgcaccaatcagcactctctctagctcagggtttgtagatacaccaatcgacactctgtatctagctgatctaatggggacttggagaacttttgtgtctagctcagggattgtaaatgcaccaatcagcaccctgtcaaaacaggccaatcagctctctgtaaaacagaccaatcggctctctgt

SEQ ID NO: 2801 - DNA, 106 bp, homo sapiens
aagtataggaaaaatactcataagagaaaaagatcacgactgacactattataagcataaggacctaaatatagcaaagtataggaaaatactcataagagaaaaa

SEQ ID NO: 2802 - DNA, 112 bp, homo sapiens
acttagtagtatattagtatacttaatacttagtatactaataatattaataagtgtaagtattatagaagtattaatacttacacttattagtatattagtatacttaata

SEQ ID NO: 2803 - DNA, 73 bp, homo sapiens
ctgtatctagctactctggtggggacttggagaacctttgtgtccacactctgtatctagctaatctggtggg

SEQ ID NO: 2804 - DNA, 84 bp, homo sapiens
agaatacaaatatcaatgaaccaaaagatgagagcataaataaataaaattaagacttagaatgcaaatatcaatgaaccaaaa

SEQ ID NO: 2805 - DNA, 110 bp, homo sapiens
atatgcgtatgtgatactcatataaacatgcgtatgtgtatacatatgtatgtaacatacatatgcgtatgtgatacgcatatgtttatatgcgtatgtgatatttcact

SEQ ID NO: 2806 - DNA, 92 bp, homo sapiens
ttaagattggaaaaagagaaaaagcatgttcctattattacttgttagaattctagaaagttaagattggaaaaagagaaaaaacatgttcc

SEQ ID NO: 2807 - DNA, 94 bp, homo sapiens
gaaatctcttcctttgtgtaaataattataagtaagtactggggcatcatttaaaacaaatacgaaatctcttcctttttgtaaataattataa

SEQ ID NO: 2808 - DNA, 96 bp, homo sapiens
aatcaatgccttcattcattcattcagatttcaaatcttagctttaatcaatggtctcataggactcaagttaatgccttctttcattcattcaga

SEQ ID NO: 2809 - DNA, 93 bp, homo sapiens
ctatctgcaggcaggtcatcccactgagtttgcagcatttagtggagaggagacccagagtgggcagcttctatctgcaggcaggtcgtccca

SEQ ID NO: 2810 - DNA, 77 bp, homo sapiens
gaaagtttggaacttgctagagatttggagggctcagaagacaggaaaatgcaggaaagtttggaacttcctagaga

SEQ ID NO: 2811 - DNA, 108 bp, homo sapiens
tggtcctggggtaggtcttgagtgtgaccttgagaggctgaccacgtactgggatgggcctggtacccaagtctgcagggttggtcctggggtaggtcttgagtgtga

SEQ ID NO: 2812 - DNA, 88 bp, homo sapiens
acacagattagataccagacactgttttgggtgtggtctttcagcccagtaacacttactaaacacagattagataccagatactgtt

SEQ ID NO: 2813 - DNA, 108 bp, homo sapiens
catttattattgcacaatttctgtgggtcaggagtctatgttatatcacaaatcacaaatttagcagcttgaaaccacacacatttattattgcacaatttctgtggg

SEQ ID NO: 2814 - DNA, 112 bp, homo sapiens
atcattgagacagggtctcactctcacagcttattgcactcttgacctctggggctacatatctttattatgattatgattattatcattgagacagagtctcactctcaca

SEQ ID NO: 2815 - DNA, 122 bp, homo sapiens
tcaaatattatactactcatttttcagtatatatatttaacttaatataggctaccttcaaatattatactactcattttaagtataacataagagccttacgataatatacttttcattct

SEQ ID NO: 2816 - DNA, 116 bp, homo sapiens
tttttactgtctctataattttgcctttaccaaatgttatattggtaacatacagtatggaatcatacagtatatagcctttccagattttttactgtctctataattttgccttt

SEQ ID NO: 2817 - DNA, 108 bp, homo sapiens
tcaaatatacataacatttatcatcaaagatgataaatttaaatttaaaattttaaaaatttaaaaatttaaaaaatcgtgatcaaatatacgtaacatttatcatca

SEQ ID NO: 2818 - DNA, 101 bp, homo sapiens
gcttatgatgatttgacttactattttttgactttctgttgtggaatctgatgcttatgcctgccttatgatgattcaacttactattttttgactttctg

SEQ ID NO: 2819 - DNA, 109 bp, homo sapiens
aaacttctattatgcatatattgcatcacttaataatgtcacataactccacttccttctcctttctattctctggggaaacttctattatgcatatattgcttcactt

SEQ ID NO: 2820 - DNA, 109 bp, homo sapiens
accaatcagcgctctgtgtctagctaattgggtagggggcttggagaacttttgtgtctagctaaaggattgtaataaacgtaccaatcagcactctgtgtctagctaa

SEQ ID NO: 2821 - DNA, 85 bp, homo sapiens
cttcttttgtggtggaatgtcatcagttaaagcaagaacgggccatttacactttcttcttttgtggtggaatgtcatcagttaa

SEQ ID NO: 2822 - DNA, 85 bp, homo sapiens
taagttcttaagaaatattattaataacattacaattactattctcaatttttaatattaagtttttaagaaatattattaataa

SEQ ID NO: 2823 - DNA, 77 bp, homo sapiens
aatttagaattttttaaagaatagttggtatgtttatgtgtatttttatattttaatttagaattttttaaagaata

SEQ ID NO: 2824 - DNA, 100 bp, homo sapiens
gtggctcatgcctgtaatcccagactaacatggagaaaccccatctctactaaaaatacaaaaattagccaggtgtggtggcacatgcctgtaatcccag

SEQ ID NO: 2825 - DNA, 121 bp, homo sapiens
gtgtgtgtgtgtgtgtgtgtttatgtgtatgtattttgggagaggcaccatattatatataattgtgcatgggcttggaggtgaatgtgtgcgtgtgtttatgtgtgtgtattttgggaga

SEQ ID NO: 2826 - DNA, 82 bp, homo sapiens
tttaataaatgcccttgagcatacagtctattttgtattttttctatcataataaataatttaataactgcccttgagcata

SEQ ID NO: 2827 - DNA, 73 bp, homo sapiens
ccccaccagattagctagatacacagtgtggacataaaggttctccaaggccccaccagagtagctagataca

SEQ ID NO: 2828 - DNA, 105 bp, homo sapiens
tataaataattatgtacagtacataatatttgataataattggctggtataaacaaacttactgcactgctgtcatataaacaattatgtacagtacataatatt

SEQ ID NO: 2829 - DNA, 264 bp, homo sapiens
tggctcacacctgtaaccccagcactttgggcggctgaggtgggcggatcatgaggtcaagagatcgagatcatgaaggccaacatggtgaaaccgtctctactaaaaatacaaaaattagctgggcatggtggtgcgtgcctgtagtcccagctactcgggaggctgaggcaggagaattgcttgaacccgggaggcagaggttgcagtgcatgttggtgcatgcctgtagtcccagctactcgggaggctgaggcaggagaa

SEQ ID NO: 2830 - DNA, 82 bp, homo sapiens
aggaaatagaaaatcaatgaaaacatcaacaagtaaagtaagctaggtgcttcagagaggaaatagaaaatcaataaaacac

SEQ ID NO: 2831 - DNA, 134 bp, homo sapiens
aatgtgtgcaaacatcatcactatctaattgcagaataaattcataccataaaattcacctatgtaaaatgtacaaaggtttttaatatatctacaaatgtgtgcaaacatcatcactgtctaattgcagaata

SEQ ID NO: 2832 - DNA, 101 bp, homo sapiens
tctctaagcctacttattcagaaatgacactaactcttttaatcaatccatctttcctcctcctttcaacatattgtctctaagcctaattattcagaaat

SEQ ID NO: 2833 - DNA, 90 bp, homo sapiens
taaggaaatataaacaacccaccattctttgtcacagtcttgagaggtgaagccggctgggctttaaggaaatataaacaaaccaccatt

SEQ ID NO: 2834 - DNA, 91 bp, homo sapiens
tgcagtgtctctatcatagctcacagcagccttgaatcagggtctcagtaggtcaccctggctggagtgcagtgtctctattatagctcac

SEQ ID NO: 2835 - DNA, 128 bp, homo sapiens
tcatgaggccaagagatcaagaccatcctggtgatcaaggtgatcctgtaatcccagcactttggaaggccgagttgaggggatcatgaggccaagagatcaagaccatcctggtgatcaaggatgat

SEQ ID NO: 2836 - DNA, 94 bp, homo sapiens
caataatgtacatattttaaacttaaaacatatttttaacttaaaataaaaaaacataaaataaaaataaataaaataaaaataaaacttaaaa

SEQ ID NO: 2837 - DNA, 116 bp, homo sapiens
atgtaatattttgatgtgattctctttaaatattttcatgtatgctattatgcttagtaaatcaaaatgaaaatgaaaagaaaaaatgtaatattttgatgtgattctttttaaat

SEQ ID NO: 2838 - DNA, 123 bp, homo sapiens
actcatccaatgcttaagtatggaactatggctctcatttcagtgttccatttcatttccacaatattacttgtagacttctataaacactcatccaatgcttgagtatggaactatggctct

SEQ ID NO: 2839 - DNA, 96 bp, homo sapiens
caatcagcactctgtaaaaaggcaccaatcggcactctgtgtctagctaaagaattgtaaatgcagcaatcagcactctgtaaaaatgcaccaatc

SEQ ID NO: 2840 - DNA, 139 bp, homo sapiens
ttttacagagtgctggttggtgcatttacaatcctttagctagacacagagtgctgactggtgcatttttacagagtgctgattggtgcacttttacagagtgctgattggtgcatttacaatcctttagctagacaca

SEQ ID NO: 2841 - DNA, 88 bp, homo sapiens
aggcttgcactaatgactaaatgcattaaaattcctctttctttcaatggtggaaacaaacatagaggcttacactaatgactaaatg

SEQ ID NO: 2842 - DNA, 233 bp, homo sapiens
ctaaccagcactctgtgtctagcttaaggttcgtgggtgtgccaatcagcactctgtatctagctaagctcgtggggacttggagaacatttatgtctagctagaagattctaaatgcaccaatcagcactctgtgtctagctcagggattgtaaatgcaccaatcagcaccctgtcaaaatggaccaatcagctttctgtaaaatggaccaatcagctctctgtaaattgga

SEQ ID NO: 2843 - DNA, 231 bp, homo sapiens
caccaatcagcactctgtgtctatctagctccgggttcatggatgcaccaatcagcactctgtatctagctaatctggtggggacttggagaacttttatgtctagctaaagaattgtaaatacaccaatcagcactctgtatctagctcaaggtttgtaaacgcaccaatcagcaccctgtgtctagctcaaggtttgtaaatgcaccaatcagcaccctgtgtctagct

SEQ ID NO: 2844 - DNA, 90 bp, homo sapiens
tgttaacggtttgatgtagtacctcacacacacacacgtatctatatgcacacaccacaaatatcattgttaacagtttgatgtagtacc

SEQ ID NO: 2845 - DNA, 91 bp, homo sapiens
aaggaccttaatttcattctatactattattattttacatttatctggtaagacatttgctccgaaggaccttaatttcattctatctata

SEQ ID NO: 2846 - DNA, 75 bp, homo sapiens
tttttaggctatttcatagatggtaaatcagtttttttttttttttttcctttttaggctatttcatagatgata

SEQ ID NO: 2847 - DNA, 120 bp, homo sapiens
tcatttcttgtcttatatctcttcaacttatgggttatcatataaggagtaccaaaaagaaaatacatggatctagttttacagttattcatttcttgtcttatatcttttcaacttatg

SEQ ID NO: 2848 - DNA, 151 bp, homo sapiens
tgtgtgtgtgtagtgtgtgtgtgtgtttcaatattggaattagatttaaaggcgagattagattgggaaataaatctacgtgtgtgtgtgtgcctctgtgtgtgtgtgtgtgtgtgtgtgtgtgtttcaatattggaattagatttaaagg

SEQ ID NO: 2849 - DNA, 95 bp, homo sapiens
tctcagtaactcttattagaattcctaaaactattacaaatagtgtgtattccaatattatgtgatctcagtaactcttattagaattcctaaaa

SEQ ID NO: 2850 - DNA, 60 bp, homo sapiens
gattggttataacatgaaggatattagattgtcattagattggttataacatgattggtt

SEQ ID NO: 2851 - DNA, 116 bp, homo sapiens
aacacttaagagtttctctaaaagaataacttcccaggtcctgaggcctctggaattactttttttattctacaaacactgaagagtttctctaaaagaataacttcccaggtcct

SEQ ID NO: 2852 - DNA, 88 bp, homo sapiens
tgaaacacaaaaagtgaaaatgtattgaaatataaatgtgttaaacattttgataatatgaaacataaaaagtgaaaatgtattgaaa

SEQ ID NO: 2853 - DNA, 138 bp, homo sapiens
aaaaaaacccacggattatagaattccagtgctatctttaaataattctataagaccctgtctcaaaaaaagacaaaaacaaaaccaaaaaaaaccacggattatagaattccagtgctatctttaaataattctata

SEQ ID NO: 2854 - DNA, 461 bp, homo sapiens
ccccaaccccttctctccttgtctctaccccttctctgcttttccagggacagggcaagtaccccaaccccttctctccttgtctctaccccttctctgcttttccggggagagggcaagtaccccaaccccttctctccttgtctctaccccttctctgcttttccagggacagggcaagtaccccaaccccttctctccttgtctctaccccttctctgcttttctgggagaggggaaagtacccctcaaccccttctccttcacccttagcggcaagtcccgctctcctagggggcaagaaccccccaatcgcttatttccatgccccaacctctgatctctgcgccccaatcacttatttccatgccccaacctcttatgtctgtgccccaatcccttttttccacaccccaacctcttatttctgtaccccaatcccttatttccatgccccaacc

SEQ ID NO: 2855 - DNA, 144 bp, homo sapiens
tcgtggtctcactggctcaggagtgaagctgcagaccttcgcagtgagtgttacagctcttaaggcagcgcgtctggagttgttagttcctcccggtgggctcgtggtctcactggcttcaggagtgaagctgcagaccttcgc

SEQ ID NO: 2856 - DNA, 86 bp, homo sapiens
tattgcaagatggatggaccacaccgcgcctggcctaacccgttcctttttattgttgattactattgcatgatggatggaccaca

SEQ ID NO: 2857 - DNA, 78 bp, homo sapiens
ctggccagttactgtgtgagaacgggacctctgatgcctactcgcctaggcgctggccagttgctgtgtgagaacggg

SEQ ID NO: 2858 - DNA, 92 bp, homo sapiens
tgagtggtcttgggaatctaaatataacatgtttctaagttacacacagcataaatgagtgtttatgagtggtcttgggaatctaaatataa

SEQ ID NO: 2859 - DNA, 99 bp, homo sapiens
tcctgttgcaggactttcccttagttcagctgcaagatctccggaccctcagcagacctccttccctgttcctgttacaggactttcccttagttcagc

SEQ ID NO: 2860 - DNA, 87 bp, homo sapiens
tactaagccatcttagcagtgaggttttttttgcttttgtttttttgagacagagtcttactaagccatcttagcagtgagtttttg

SEQ ID NO: 2861 - DNA, 104 bp, homo sapiens
acaggtttggtccttgggttcacattcttctgcttgatttctctgtgtacatcactaagttgcctgtaaataggaacaggtttggtccttgtgttcacattctt

SEQ ID NO: 2862 - DNA, 97 bp, homo sapiens
tttacaaacctttagctagacacagagtgctgatttgtgcatttttacagagtgctgattggtgcgtttacaaacctttagctagacacagagtgct

SEQ ID NO: 2863 - DNA, 120 bp, homo sapiens
tagccaggtgtggtggcaggtgcctgtaaccctagctactggccaacatggtgaaaccctgtctctactaaaaatacaaaaattagccaggtgtggtggcaggtgcctgtaaccccagct

SEQ ID NO: 2864 - DNA, 82 bp, homo sapiens
ctgtctggatcttgcttagctttgcctccaccttcagtcagagggcggatcttgctgtctggatcttgcttagctttgcctc

SEQ ID NO: 2865 - DNA, 112 bp, homo sapiens
tgaagatccccagtaatatttcagcttgctttcactcgatgttaatccaacacctataactcttttccccaagactgaagatccccagtaatatttcagctttgctttcact

SEQ ID NO: 2866 - DNA, 124 bp, homo sapiens
aatacttttataatttcttatgcctgtctttactgcagtatctgaacataaattgtgaagatttcatggacacttatcacttccccaatcaatactcttataatttcttatgcctgtctttact

SEQ ID NO: 2867 - DNA, 96 bp, homo sapiens
actgggtttctacccaaaggaaaagaaaaaataaatttggtatatttgtatgaatccaacaatcccaccactgggtttctacccataggaaaagaa

SEQ ID NO: 2868 - DNA, 101 bp, homo sapiens
gtttgaaaattgagtatttataatcaccgtgaatgggagctagaataataataaaaagggaattgaaaatctgcaaatgtttgaaaattgagtatttatac

SEQ ID NO: 2869 - DNA, 75 bp, homo sapiens
gctccaagaagggcacagcaccatccaccttgcaaactgtggagtcctgggctccaagaagggcacagcaccgtc

SEQ ID NO: 2870 - DNA, 151 bp, homo sapiens
tcagtagtaatatcaaaacgtgattttgtctgtattgatgaatgaaatgtgtccatgtttggaagatctatatatttcagtaaaccaatattttcttataaggtcagtagtaacatcaaaacgtgattttgtctgtattgatgaatgaaat

SEQ ID NO: 2871 - DNA, 98 bp, homo sapiens
gtatagccataaccttcttatcagaattgaaatgtggatgtagccataactttcttatcggaattgaaatgtgagtgtagccataaccttcttatcag

SEQ ID NO: 2872 - DNA, 113 bp, homo sapiens
ataatttgtgtgcttcaaaaatatcaaagcctgtagaaggccatgaataaaaacaaatcatgaggaaacatcagaggcacccaggataattcgtgtgcttcaaaaatatcaaa

SEQ ID NO: 2873 - DNA, 97 bp, homo sapiens
tattcagtagaagcttctaaacatatctttatatgttctgaaacatataaaacaaagcacatttttcagaattattcagtagaagcttcgaaacata

SEQ ID NO: 2874 - DNA, 92 bp, homo sapiens
aaatttaatacttaccctaccattattgaacaaaatacacaaagcaacattaaaaaaagaaaaacaaaaatttaatacttaccctactatta

SEQ ID NO: 2875 - DNA, 89 bp, homo sapiens
gactggccacatggagtatgtgtatctcggagaagaacattgctgacctctgtaggaagaaagactggccacatggagcatgtgtatct

SEQ ID NO: 2876 - DNA, 74 bp, homo sapiens
gggtggggatggtccctgctccatagaaagggacaggtgcaccaggacacgggtggggatggtccctgctcctc

SEQ ID NO: 2877 - DNA, 147 bp, homo sapiens
acaaactttccatgtggacaaagctgtcctttctcatgcctcagacgccactgagggcacaccaaggccattggcggcgtggccgtggacttacacaaactttccatgtggacaaagctgtcctttctcatgcctcagatgccactg

SEQ ID NO: 2878 - DNA, 67 bp, homo sapiens
ctagacgcttttatgctgaattcttgaacacacatagactcagctggactcttttacgctgaattca

SEQ ID NO: 2879 - DNA, 130 bp, homo sapiens
tgggtggtggtccgcacctgtggtcccagctacatggtcactaagtacagggtacagatacagtaagtgaagctggtgaatattcgagagccatgggtggtggtcggcacctgtggtcccagctacatgg

SEQ ID NO: 2880 - DNA, 88 bp, homo sapiens
cttagaattatcatttcattataaaatttgctcaaatggctcacagtactcaggaaagtgctgcttagaattatcatttcattataaa

SEQ ID NO: 2881 - DNA, 262 bp, homo sapiens
tcctcccacctcagcctcccaaggagctaggactacaggcacttgctcactacaccttcaacctcctgggctcaaacagtcctcccacctcagcctcccaaggagctaggaccacaggcagttgccactatgcctggctaatttttatttttattctttgtagagacaggtgtcttggatttttggcccaggctggtctcaaattcctggactcaagtgagcctactgccctcagcctcccaaagtgctaggattacagaca

SEQ ID NO: 2882 - DNA, 136 bp, homo sapiens
gaacataaattgtgaagatttcatggacatttatcagttcccaaaattaatatgtttataattttttacacctgtcttgactgcaatctctgaacacaaattgtgaagatttcatggacatttatcagttcccaaa

SEQ ID NO: 2883 - DNA, 79 bp, homo sapiens
agctcacttatcaagactaatggcttcagaagtaagactgaacccatcaaaacagctcacttatcaagactaatggctt

SEQ ID NO: 2884 - DNA, 80 bp, homo sapiens
gcaaacaccagattcaaagctgcttcagaactgcaaccctacctgagtttccagcccgcaaacaccagattcaaagctgc

SEQ ID NO: 2885 - DNA, 109 bp, homo sapiens
tcaaccaatgaatagctaaagaaccactctggaaggtgccacacttcatgtctgccacctactgtcatgaaaactcaaccaatgaatagctaaagagccactctggaag

SEQ ID NO: 2886 - DNA, 96 bp, homo sapiens
taaggggccggtggagagttacctgacatttccacatggggctaacacatacatcaggagccagtaaggggccggtggagaattacctgacatttc

SEQ ID NO: 2887 - DNA, 103 bp, homo sapiens
gtctcattccttacacccaggcatggagagtaatcagatggtttttgtttttgtttgtttgcttgtttgtttttgaggtctcattctttacacccaggcatgg

SEQ ID NO: 2888 - DNA, 103 bp, homo sapiens
tactcaagtatcacattgtttatattgtccaaaaataaaatgtttttctgcaaattaaaattagtattgctgtactcaagtatcacatcgtttatattgtcca

SEQ ID NO: 2889 - DNA, 117 bp, homo sapiens
gacagtgctatccatatttaattttattttcattgtcttctaaaacggagactattttatttatttctataggtacaacgacagtgctatccatatttaattttattttcattgtct

SEQ ID NO: 2890 - DNA, 182 bp, homo sapiens
tctgacagtacaagcgtgttcgtaaatatttgggtgatgtcatgcattctccatgtattggttctggcagcacaagcgtgttcgtaaatatctgggtgacgtcatgcattccccatgcattggtttagagatctggggtctctggcagcacaagcgtgttcgtaaatatctgggtaacgtca

SEQ ID NO: 2891 - DNA, 96 bp, homo sapiens
aacatcccattttcaacactgaacagattagagatagactgcaatgcaacaacagtaaaggacttcaacatcccattttcaacattgaacagatta

SEQ ID NO: 2892 - DNA, 137 bp, homo sapiens
ttcagatatttaaggttatctataaaggtttaatttgtttttcctaatgtctgtctaccccttccctcaattgtcccatcattcaactctatacatattcagatatttaaggttatctataaaggtttaatttgttt

SEQ ID NO: 2893 - DNA, 101 bp, homo sapiens
ccttctccctaacttgtggatgcccgtggacaacactaccaaccacagacagtatattcaatatgctgccttctccctcacttgtggatgcccgtggacaa

SEQ ID NO: 2894 - DNA, 104 bp, homo sapiens
acaggaaagttctccaagtccccaccagattagctagacacggagcgctgattgatgcggttacaaacctctagctaaacagaaaagttctccaagtccccacc

SEQ ID NO: 2895 - DNA, 87 bp, homo sapiens
tagatgaagcatttttgcatgctagggtagacaatacacacagttacagcatacatcgtagatgaagcatttttgtatgctagggta

SEQ ID NO: 2896 - DNA, 105 bp, homo sapiens
gactcagctgatctggactgggctcatttgtgcaatttgagctggcttcattggggcaggcctgatcttctgggccagactcagctgatctggactgggctcatt

SEQ ID NO: 2897 - DNA, 95 bp, homo sapiens
ccagatttttacacacttaccttattgaagcctcatcacaaccccgtctattaaattataggcattattcccagatttttatacacttaccttat

SEQ ID NO: 2898 - DNA, 155 bp, homo sapiens
ccacttttctgggggaggggcaagaaccccaatcccttctctccatgtctctaccccttctccacttttctgggggaggggaaagaacccctcaaccccttctccttcacccttaatggcaagttctgcttttctggaggaggggcaggaacccc

SEQ ID NO: 2899 - DNA, 135 bp, homo sapiens
ctcagggattattcaggccctctcccttccctacacatcaagttcaaggatttgctcctgcccaggacaggcaaatttgctattctactacttctcagggattattcaggccccctcccttccctacacatcaag

SEQ ID NO: 2900 - DNA, 108 bp, homo sapiens
ctctgtcagcccttcacctttatgaccttgccttatctaccagaacacagatccctcttactaaaggtagccttgtgttacctctgtcagcccttcagctttatgacc

SEQ ID NO: 2901 - DNA, 75 bp, homo sapiens
tatgtatccactacctcaagcatttatcctttaatggatacacaatggtaattatgtatccattacctcaagcat

SEQ ID NO: 2902 - DNA, 253 bp, homo sapiens
ggggtgagagccaggggctgagtccaggggccagggggctgggggccagggctagagctggggctggagctgtggtcggggactgagtccaggggctggggaatgggggctggggctggggtgggggctggagactgaatccaggggccagggggccagcagggccggggtgggggctggagactgagtccaggggtcgggggctaaggctaggagtggggctggggtggggactggagactgagtccagggg

SEQ ID NO: 2903 - DNA, 583 bp, homo sapiens
gtgtcctccccggcacatgtgtcccccccaggcgtaggtgtccccttggcacatgtgtccccacaggcacaaggtccttcctggtgcaggtgtccccttaacagtgtcttcccccacgccccaggcgctggtgtccttcctggcacaggtgtcccccctcggagcaggtgtccctccttggggcagatgtccctccaggcacaagtgtccttcctggcgcaggtgtcccctcggcgcaggagttctccaaggtgcaagtgtcccctcaagcacaggtgtccctcccaggcacaagtgtacttcctggtgcaggtgtcctcttgacggtgtccccccccaggcgcagttgtccttcctggcacaggtgtcccccctcggaccaggtgtccctcgtcggagcaggtgtccttctgggcacaagcgtccttcctggcctttaggaagctttcaaggtgcaggtgtcctccaaggtgcaggtgtcctccagcggagtgtcccctccgtgaggtgcctcccagcacaggtgttcccctcggcgcaggcgtccccccggtaaagggtccctcctggcagaggtgtctgc

SEQ ID NO: 2904 - DNA, 79 bp, homo sapiens
gtgacattttggaaaagggaaaataacatagatagtaaaatatctatgtaattacgtgacattctggaaaagggaaaat

SEQ ID NO: 2905 - DNA, 100 bp, homo sapiens
tcccaccagccagactagggaaactctcaatagatcaattcctgatactcatgtgggctggggacaggacccactcccaccagccagactaggaaaactc

SEQ ID NO: 2906 - DNA, 113 bp, homo sapiens
ccccctcccggagtgtgtccccaccccagtggtccctgtgtcaccccctccccgagtgtgtccccaccccaggggcccccatgtcaccccactccaggtgtgcccccacccct

SEQ ID NO: 2907 - DNA, 74 bp, homo sapiens
gaagcatctgagcacccttagccatcacaccactgcactcctgcctgggtgaagcatctgagcacccttagcag

SEQ ID NO: 2908 - DNA, 87 bp, homo sapiens
tcctactgaaaataggacggtggggccagtgaacagtatctgctgtgatagatgataaaatcctactgaaaataggatggtggggcc

SEQ ID NO: 2909 - DNA, 93 bp, homo sapiens
gggggtcgcagcctttttccacacacggtgagcagcgtcctgggaacagccagccgagggtgtggtaggggggtcgcagccttgttccacaca

SEQ ID NO: 2910 - DNA, 80 bp, homo sapiens
ccccctgctgggcatttacccaaattaaaaatggaacttccatgcaacgcagcagtccccctgccgggcatttacccaaa

SEQ ID NO: 2911 - DNA, 106 bp, homo sapiens
cagtcggggatgaagcagtcgggtgatgctcccaagtccgcagtcggggatgaagcggtcgggtgatgctcccaagtccgcagtcggggatgaagcggtcgggtga

SEQ ID NO: 2912 - DNA, 83 bp, homo sapiens
tttttaccacggattcactttccaacgcccaagcctcactaggtgttagaaccggtgtgttcttaccacggattcactttcca

SEQ ID NO: 2913 - DNA, 147 bp, homo sapiens
accactcactaccagtgaggccgaaagccgctgtaacgacacagacgggcgccgaaagccgccgtaatgacacagatgggcgctgtgttccagtgaaactttaccactcactaccagtgaggccgaaagccgccgtaacgacacaga

SEQ ID NO: 2914 - DNA, 102 bp, homo sapiens
gccacctgcccccaccctcagcctcatctttggagcaggtgctggcactcaggaaggctcctctgaggcaggaacctcggccaccggcccccaccctcagcc

SEQ ID NO: 2915 - DNA, 89 bp, homo sapiens
tcgcatttctcttggctgccagccgggcttgtctacacccagatcccaggctcacccacctacagtcgcatttctcttgggtgccagcc

SEQ ID NO: 2916 - DNA, 208 bp, homo sapiens
aagacagagaaatggagctagactcatcctttatcgggaacccagccctgcgctacagcattcctgcctccctgcgggctggccctgtgacctgttccagactcatcctttatcaggaacccagccctgcgatacagcattcccgcctccctgagggttggccctgtgacctgttccagactcatcctttatcaggaacccagccctg

SEQ ID NO: 2917 - DNA, 168 bp, homo sapiens
ggcggggccgtgattacgcctgcggcactgactgtgtccctccctgatgcagggctgttacggcggtgccgtgattacgcctacggcactgaccgtgtccctccctgatgcggggctgttacggctttggcggtgccgtgattacgcctacggcactgaccgtgtccc

SEQ ID NO: 2918 - DNA, 90 bp, homo sapiens
agcggcaagtcccgcttttctgggggaggggcaagtacccctcaaccccttctccttcacgcttagcggcaagtcccgcttttctagggg

SEQ ID NO: 2919 - DNA, 139 bp, homo sapiens
tcggagaaccaggaaggggctctcatcagacaccggatctgccggcgccttgagctgggacttcccctgctgtgtgaggacaaccagaggaggccgtcggagaaccgggaaggggctctcatcagacaccggatctgcc

SEQ ID NO: 2920 - DNA, 80 bp, homo sapiens
ctgcttggaggctgagcccaccccacttgcgccccaacccccagggccaggacctgcttggagactgagcccaccccact

SEQ ID NO: 2921 - DNA, 139 bp, homo sapiens
tcggagaacccggaaggggctctcatcagacaccggatctgccggcgccttgagctgggacttcccctgctgtgtgaggacaaccagaggaggccgtcggagaaccgggaaggggctctcatcagacaccggatctgcc

SEQ ID NO: 2922 - DNA, 437 bp, homo sapiens
agccctgctcacccagccctgcacacgtgagcccagctcacccaggcctggccctgctcacacagccctgcacacccagccctgcacaactgagccctgttcgcctggccctgctcacctgggcgtgctcacctgggcctgcacacccagccctgcacagccagccctgcacagccagccctgcacacccagccctgctcacccgagcccagctcacccatgcccggccctgctcacatggccctgctcatccagtcttgcacacacggccctatacacccggcccttcacacatggccctgcacacacagccctgctcacccagatctagaggagatgagtccacccgtcggccctgcacacacagccctgcttacccaggcctagagaagatgaggctacccattggccctgcatacacagccctgtgccagtcg

SEQ ID NO: 2923 - DNA, 93 bp, homo sapiens
gcaggagcaaaggaggcagacacctcctggcagtgcctgtggcaggtgggcctgccgtgggcgcaggagcgaaggaggcagacacctcctggc

SEQ ID NO: 2924 - DNA, 88 bp, homo sapiens
gtgctgagcggcctcaccagtggcagaggcacccagtgtcccagcctgtggggctcctcacgcccgtgctgagtggcctcaccagtgg

SEQ ID NO: 2925 - DNA, 83 bp, homo sapiens
cccaaccccactgcctggaggctgagttccctgtgaaggcgcgaggacccaggaacactcccaaccccactgcctggaggctg

SEQ ID NO: 2926 - DNA, 119 bp, homo sapiens
cccctgtggggtgggggcctcatagccatgctcccagggtgggatgcagcgccctccccgctggagcctggagcctgtgcctctgaggcccctgtggggtgggggcctcacagccatgc

SEQ ID NO: 2927 - DNA, 141 bp, homo sapiens
agccaaagcaacagctgcgttccatggtgtcacccactcacagagcctggagggtggagtggagggaggggtggttccccaaaggaaagcctccagaagccaaagcaacagctgcgttccatggtgtcaccaactcacaga

SEQ ID NO: 2928 - DNA, 97 bp, homo sapiens
cagccaggccatgggcccgcactgaccacaaccccattcactcatagacttccgtaaatgcacagccaggccatgggcccgcactgaccaccacccc

SEQ ID NO: 2929 - DNA, 118 bp, homo sapiens
ctggaacatccagcgagggctgtgctctaatccacctgccctgcctcaagccctgacccgccaccctccacgtgctggaacatccagcgagggctgtgctctaatccacctgctctgc

SEQ ID NO: 2930 - DNA, 115 bp, homo sapiens
cacacacatctgagacacaggtctcacagaaccgcccttgcccttctgtctgtctgtctgcctgcctctctctcacacacacacctgagacacaggtctcacagaaccgcccttg

SEQ ID NO: 2931 - DNA, 105 bp, homo sapiens
agagggcccgcggctgggggccccttacggacactaggcaggactcgcatccgagacactgtttccagctgccctgtagcagagggcccgtggctgggggcccct

SEQ ID NO: 2932 - DNA, 77 bp, homo sapiens
gtgtctctggagcaagggccgctgctggagggcaggcgggcctggaggagtgcagtgtctctggagcaggggccgct

SEQ ID NO: 2933 - DNA, 110 bp, homo sapiens
gtcgtacgatgggcctggcttcactgaatcctatctatgaacctggaatctgacagagaaaccaaccctcacaagcttttgtcgtacgatgggcctggcttcactgaatc

SEQ ID NO: 2934 - DNA, 100 bp, homo sapiens
tgagtcagcccattcagttccttttccaggggccacactgagtcagcccattcggttccttttccaggggccacactgagtcagcccattcggttccttt

SEQ ID NO: 2935 - DNA, 103 bp, homo sapiens
ccatccacagcccaaagtgcccagcacggccctgccctctgccctggtctatggtctcccctcttaaatgccagcaccatccacagcccacagtgcccagcac

SEQ ID NO: 2936 - DNA, 83 bp, homo sapiens
ggtgcaggtctgaatatcttactcacagcagccactgtgtctactgcaggggacggtgcaggtctgaatatcttactcacagc

SEQ ID NO: 2937 - DNA, 100 bp, homo sapiens
agaacgcagacacagcgccctcagaggccggctgcagaaaggactggagacactgcaaatgaaaacgtctacacgagaatgcagacacagcgccctcaga

SEQ ID NO: 2938 - DNA, 94 bp, homo sapiens
tgagggtatatgtataagcctcagtgcgtaaccagatgcgtgtgtgtgagcccaggtgcgtgtgtggtgagggtatatgtataagcatcagtgc

SEQ ID NO: 2939 - DNA, 88 bp, homo sapiens
cacctgtgcccttgcctacctgtgtggctgccactatgtctcaaagggcagtaccctcagaggatcacctgtgcccttgcctacctgt

SEQ ID NO: 2940 - DNA, 93 bp, homo sapiens
atcgcgtgctctgtgggaagagcccagtggagccctgtacctgcccaggccggtgtctgactccagatcgcatgctctgtgggaagagcccag

SEQ ID NO: 2941 - DNA, 97 bp, homo sapiens
gctttggctatgctggggggagcacagcacaggtggttcatccatcctcctacaccagacccaggctacttcccgctttggctatgctggagggagc

SEQ ID NO: 2942 - DNA, 99 bp, homo sapiens
cccctgttccacaccatccccaggactgcgggtcgagtggtttgcttgaagctcacaaagttggaatcggcccctcttccacaccatccccaggactgc

SEQ ID NO: 2943 - DNA, 149 bp, homo sapiens
gatttttcagttctacgattttgatttggatagtttttgtaacttctatttctttgtggtgatttttaaaaatttctttccaatcagtgttccatcgttgtgatttttcagttctatgattttgatttggatagtttttgtaacttcta

SEQ ID NO: 2944 - DNA, 116 bp, homo sapiens
tggctttcaaaatggctgtttttaacaatagccattagtaaatttttaaataatggctatttttaataactaatatgggtttattttaaacatttttaaataatggctacttttaa

SEQ ID NO: 2945 - DNA, 77 bp, homo sapiens
tcttccaaattgaactcattgataatgtggtctcttggatactcaaataacatcttccaaattgaactcattgaaaa

SEQ ID NO: 2946 - DNA, 119 bp, homo sapiens
ggtgaggaaggtggcctgggggcggggtggcacctgctttgggctctgcctggagcccgggacctcagaactccagccacggtgaggaaggtggcctgggggcggggcggcacctgctt

SEQ ID NO: 2947 - DNA, 88 bp, homo sapiens
cctcatgggaggtgtcgaggtcatggatgcagagtggcctccagtattagaggtggacctcatgggaggtgtcgaggccatggatgca

SEQ ID NO: 2948 - DNA, 105 bp, homo sapiens
atatttacatctattatttggaatttctccataaaaggggagggggaagctgcagctccacttcctgaagaggaggatatttacatttattatttggaatttctc

SEQ ID NO: 2949 - DNA, 116 bp, homo sapiens
ctctgccatctcgatatatacacgcctcagtgtctattttctataaaaatcttcatcagagaactccgacacctctgccatctcgatatatacacacctcagtgtctattttctat

SEQ ID NO: 2950 - DNA, 81 bp, homo sapiens
ccccctccatgtgtggcatgaggctgccagggaccctaaacaaggcccaacctccccctccatatgtggcatgaggctgcc

SEQ ID NO: 2951 - DNA, 144 bp, homo sapiens
acacactgtcacacactgatacacatgtacaggatgacagaatcacagtgtctcacttacacatgcaggcacacacgtgcacaggcttgcacaccatacacactgtcacacactgatacacatgtacaggatgacaaaatcaca

SEQ ID NO: 2952 - DNA, 103 bp, homo sapiens
agccaggaagaaactgattccctgaacagaccaataacaatggctaaattcctggacatatacatgctcccaagactgagccaggaagaaactgattcccaga

SEQ ID NO: 2953 - DNA, 91 bp, homo sapiens
aatttaaaaagtgtacattggtgaggaagcattttcacctgatcagaatttaaggacaaagttataacaatttaaaaagtgtacattggtg

SEQ ID NO: 2954 - DNA, 87 bp, homo sapiens
aaatattttctatcagtctgtgtctgacagtctgtgtgtgatccaaaataattttttggatcaaatattttctatcagcctgtgtct

SEQ ID NO: 2955 - DNA, 147 bp, homo sapiens
acagaactaacaggatagataggtaggtaggtaggtaggtaggtagatagatagatagatagatagatagatagatagatagatagatagacagacagacagacagacagacagatagatagattagatagatagatagatagatag

SEQ ID NO: 2956 - DNA, 124 bp, homo sapiens
agttctaacaaaactagaaaagtttaggtgcggccctgaaatgtaatttttaggtggggcccccaaatgtgattttgaggtcttttccagttctaacaaaactagaaaagtttaggtgggcccc

SEQ ID NO: 2957 - DNA, 96 bp, homo sapiens
gtacccctcaaccccttctccttcacccttagcggcaagtcccgcttttctgggagaggggcaagtacccctcaaccccttctccttcacgcttag

SEQ ID NO: 2958 - DNA, 84 bp, homo sapiens
atcccattactgggtgtatgccctccccctcagataaatcgttgtaccaaaaggacacatcccattactgggtatatgccctcc

SEQ ID NO: 2959 - DNA, 102 bp, homo sapiens
tgcactccagcctgggcaacagaatgaagtggaggttgcagtcgaggttggaggttgcagtgatgggggattgtaccagtgcaccccagcctgggcaacaga

SEQ ID NO: 2960 - DNA, 106 bp, homo sapiens
agagcactccacctctgctgccagtgaagggagttttctgaatgttccaggctatcacacgccctttataccaagactccaagagcactccacctctgctgtcagt

SEQ ID NO: 2961 - DNA, 100 bp, homo sapiens
acatgaaaactccacagcaaatcacagaaaattagacaaacccagaagataactacatcagaatgataaaaatcacacatgaaaactccacagcaaacca

SEQ ID NO: 2962 - DNA, 121 bp, homo sapiens
ggctgtctgcagattccctaaccactccccttccccacccctcagtggcttgggcttcctctcaacatggtgtctggctgtctgcagattccctaaccactccccttccccacccctcagt

SEQ ID NO: 2963 - DNA, 88 bp, homo sapiens
tgacctcctgttacagtagaggccgtgcagtccttagcaggggcagacgcacctccgggtggtcgtgacctcctgttgcagtagaggc

SEQ ID NO: 2964 - DNA, 77 bp, homo sapiens
tttaaccttaaaaagctagaaaaaggaaaggtttcagaataataaatcaagttttaaccttaaaaagctagaaaaag

SEQ ID NO: 2965 - DNA, 102 bp, homo sapiens
accaattatcattttagagaaccagtgtgacaactgctggaccatcaggaaactgcctctccctggtgtcagctgtgaccaattatcattttagagagccag

SEQ ID NO: 2966 - DNA, 99 bp, homo sapiens
gtttgtaagagagagaggaaggctacatatatacatatatataaaatctctctatattatatattatatatatgtggtttgtaagagagagagaaaggc

SEQ ID NO: 2967 - DNA, 81 bp, homo sapiens
tctaggaagttccaaactttcccacatctttctgtcttctgagcactccaagactctagaaagttccaaactttcccacat

SEQ ID NO: 2968 - DNA, 77 bp, homo sapiens
ttcatctgaatttcagatgttctaggcacattcctatgctccagtacagcaggcttcatctgaattttagatgttct

SEQ ID NO: 2969 - DNA, 104 bp, homo sapiens
tgatcatgtacaaggaattcttatttagattacaaagagataatcttgagagcatcaagagagaagcgattgatcatgtacaaggaattcttatttagattaca

SEQ ID NO: 2970 - DNA, 96 bp, homo sapiens
tggagagtcatttcacaagaagtccatctattcatttcacaagaaatgactctccaaacacgttggagagtcatttcacaagaagtccattctatt

SEQ ID NO: 2971 - DNA, 225 bp, homo sapiens
agaggattggctgtctcctttacaaagagcatgccttccaactaccaaaggcctgggccaaaggattgcctgtcttctttatgagagcatgcactccaactcactgagaggattggctgtctcctttacaaagagtatgctctccaacttatcgagtgccctccactcacccaaggcctgggccagaggattggctgtctcctttacaaagagtatgctctccaa

SEQ ID NO: 2972 - DNA, 187 bp, homo sapiens
ttgtaaatacaccaatcagcactctgtatctagctcaaggtttgtaaatgcacgaattagcaccctgtgtctagctcaatgtttgtaaatgcaccaatcagcactctgtgtctagctgatctggtggggacttggagaacatttatgtctagctaagggattgtaaatacaccaatcagcactctgt

SEQ ID NO: 2973 - DNA, 76 bp, homo sapiens
ttgtaaatgcaccaatcagcaccctgtcaaaacggaccaatcagctctctgtaaaacagaccaatcagctctctgt

SEQ ID NO: 2974 - DNA, 187 bp, homo sapiens; identical to SEQ ID NO: 2972

SEQ ID NO: 2975 - DNA, 76 bp, homo sapiens; identical to SEQ ID NO: 2973

SEQ ID NO: 2976 - DNA, 80 bp, homo sapiens
gaaatagctgcaactgggtaattgcaaactgggtaatttgcaaccggtaattgcaaagaaatagctgaaactgggtaatt

SEQ ID NO: 2977 - DNA, 134 bp, homo sapiens
tactttgtacgatacatcctccccgcccttgtgaatgtaccctgcccttgtgacaatacaccctccctgcccttgtaaatgtactttgtaacaccctccccacccttgtgacaatacaccctcccagcccttgt

SEQ ID NO: 2978 - DNA, 98 bp, homo sapiens
agtaggatataaccaacatgattgcttatattctaaacatcttatcccggttaacaattcccacagtagaatataaccaacatgattgcttatattct

SEQ ID NO: 2979 - DNA, 106 bp, homo sapiens
ctttccctatattcttattttctcataatgcctataaaaattcagcttataatgcttataaccataagcattataactgctttccctgtattcttattttctcata

SEQ ID NO: 2980 - DNA, 95 bp, homo sapiens
gaatcctgtgttttccaatgttcataagtcctaactttatgatagggtacaagaggagagaaggactatggaatcctgtgttttgcaatgttcat

SEQ ID NO: 2981 - DNA, 101 bp, homo sapiens
aaaatgattatttattattacatgtgctgggattacaggcgtgggctaccgtgcccagcctattatttttgtttttttaaaataattatttattattacat

SEQ ID NO: 2982 - DNA, 151 bp, homo sapiens
aatatgttttccaatattttaaaatatattataattcttaattctcacacataactttatctgactagtaacaatttgaatgtcactcggcattacaataaaataatatgttttccaatattttaaaatatattgtaattcttaattctca

SEQ ID NO: 2983 - DNA, 150 bp, homo sapiens
ggggtacttgcccctctagaaaagcgggacttgccgctaagagtgaaggagaaggggttgaggggtacttgcccctcccccagaaaagcagagaaggggtagagacaaggagagaaggggttggggtacttgccccttccccagaaaagc

SEQ ID NO: 2984 - DNA, 78 bp, homo sapiens
ggatgccaactttcatcactgttatttttttctaggacctgaaaaaaggcagggatgccaactttcatcactgttatt

SEQ ID NO: 2985 - DNA, 81 bp, homo sapiens
ccagcctgggcaacaaaccaagaccttgtctcaataaaataataataataaaaagaccagcctgggcaacaaagcaagacc

SEQ ID NO: 2986 - DNA, 79 bp, homo sapiens
ttccaaagagcacagagatttaaaaaagattcttccatggcaaggaactgaggcgttccaaagaacacagagatttaaa

SEQ ID NO: 2987 - DNA, 101 bp, homo sapiens
ttactgatcaactgcatttggcaaacttgatcaactgcatttggcaaagtttgtttggttttttgtttagtttgttttactgatcaactgcatttggcaaa

SEQ ID NO: 2988 - DNA, 184 bp, homo sapiens
aactagacacagagcagcgattggtgcatttacaaaccttaagctagacacagggtgctgattggtgcatttacaaaccttgagctagacacagagtggattggtgtatttacaatcctttagctagacataaaagttctccaaggccccactagattagctagacacagagtgctgattggtg

SEQ ID NO: 2989 - DNA, 91 bp, homo sapiens
gtaggcataggtcacaaaaaaatgatggaagttgttttgttggaagcttgtccaactcacagtaggcataggtcacaaaacaatgatggaa

SEQ ID NO: 2990 - DNA, 109 bp, homo sapiens
ttaatgaatattagggtgagtcttctaacagtgggagtgataaatacctcagctctttctcctcttgccatattattggttgttaatgaatattagggttagtcttcta

SEQ ID NO: 2991 - DNA, 137 bp, homo sapiens
tggaaccatgcccagctagttttttttgtatatatatatatatatatattttttttttagtagagatggggtttcaccatattggccaggctggtttggaaccatgcccagctagttttttttgtatatatatatat

SEQ ID NO: 2992 - DNA, 114 bp, homo sapiens
gtattttatatacatacatatgtgtatataagtattttacatacatacatgtgtgtatgtaagtatttcatatactaagtatcttagtattttatatacatacatatgtgtata

SEQ ID NO: 2993 - DNA, 101 bp, homo sapiens
ttctacaaagatttgttggttatttcctaggtgttcacgatatcctaaatacagaaactgaattatttttctacaaagatttgttgggtatttcctaggtg

SEQ ID NO: 2994 - DNA, 75 bp, homo sapiens; identical to SEQ ID NO: 1439

SEQ ID NO: 2995 - DNA, 75 bp, homo sapiens
atggccggttcctgccttaactgacaacattccaccacaaaagaagtgaaaatggcctgttcctgccttaactga

SEQ ID NO: 2996 - DNA, 127 bp, homo sapiens
ccaccacccacaaacacacacatgcatcccacacttacacaagtttataatttctattctttttctgtaaggtaaacattttctaccaccacccacaaacacacacatgcatacccacacttacaca

SEQ ID NO: 2997 - DNA, 186 bp, homo sapiens
caccaatcggcactctgtatctagctcaaggtttgtaaacacaccaatcagcaccctgtgtttagctcaaggtttgtgagtgcaccaatcgacactctgtatctagctgctctggtgaggacgtggagaacctttatgtctagctcaaggattgtaaatacaccaatcggcaccctgtgtttagct

SEQ ID NO: 2998 - DNA, 75 bp, homo sapiens
acacaaaggttctccacgtccccactagattagctagatacagagtgtccacacaaaggttctccaagtccccac

SEQ ID NO: 2999 - DNA, 108 bp, homo sapiens
caccaatcggcagtctgtatctagctcaaggtttgtaaatgcaccaatcagcactctgtgtctagctcagggtttgtaaatacaccaatcggcaggctgtatctagct

SEQ ID NO: 3000 - DNA, 86 bp, homo sapiens
actccaggaatgagccttcctagcactgagagacctcgccaaatgaccaaatcagataactctaggaatgagccttcctagcactg

SEQ ID NO: 3001 - DNA, 88 bp, homo sapiens
gagggggcaagggctaaaaatctaaataggccctggagactactggagggggaagggagggagggggtcaagggctaaaaatctaaat

SEQ ID NO: 3002 - DNA, 102 bp, homo sapiens
aaatctcatcttgaattgtatttcccatattcaagtaccttggtgatatagtttggctgtgtcgccaccgaaatctcatcttgaattatatttcccatattc

SEQ ID NO: 3003 - DNA, 102 bp, homo sapiens
tcagatttggagtacaattgtattaataggacaaaataaaaagccatctgaaatgcattataaatattgtttatactcagatttggagtacaattgtattaa

SEQ ID NO: 3004 - DNA, 105 bp, homo sapiens
ttctgatttctgagtcaactgagtcaatctcttttgtgtgaatacagattttcagaattgccctttatttgtggatgaaggttctgatttctgagtcaactgtgt

SEQ ID NO: 3005 - DNA, 108 bp, homo sapiens
agctagatacagagtgttgattggtgcactcacaaaccctgagctagacacagggtactgattggtgtgtttacaaaccttgagctagatacagagtgctgattggtg

SEQ ID NO: 3006 - DNA, 85 bp, homo sapiens
ctgaacccccaatatccctgactaccctgatatccctgaaccctgaaccccctgatatccctgaacccccaatatccctgactac

SEQ ID NO: 3007 - DNA, 106 bp, homo sapiens
atttagtggcccttactgatgcattctcgaaaacctgcatccttacctgtcctagaccacaaagaggactgagaaaaatcagatttagtggcccttactgatgcat

SEQ ID NO: 3008 - DNA, 81 bp, homo sapiens
aacagtttcttaataaatattaattatacacatacctcccttgaattaataaataacatttattaattaatatcaattaat

SEQ ID NO: 3009 - DNA, 104 bp, homo sapiens
tgtaaatgtcagttaacttacataggcacagaaaatgataaattttcttctagctttttttttttaatgttctgtgggcatgtaaatgtcacttaacttacata

SEQ ID NO: 3010 - DNA, 78 bp, homo sapiens
aggaggttccaaactttcccacatcttcctgtcttccgagcactccaagtctccaggatgttccaaactttcccacat

SEQ ID NO: 3011 - DNA, 94 bp, homo sapiens
aaaacatggatgaaaaatgtaaaaagacaaaaggaagtgaaggacttatacaccgtaaactagaaaacatggatgaaaaatgtaaaaagacaaa

SEQ ID NO: 3012 - DNA, 137 bp, homo sapiens
caagtgtgagatcatgaagagtggccttggattcctttatcctgagcactataaacagttattcattccttcaattgggatagaggttaagcaagtgtgagatcatgaagagtggccttggattcctttattctgag

SEQ ID NO: 3013 - DNA, 102 bp, homo sapiens
aataccatcaactttactcatgagacatggacattaggataattttggaagggcttttaaacatattcatgaataccatcaaccttactcatgagacatgga

SEQ ID NO: 3014 - DNA, 100 bp, homo sapiens
atttgatatttacacattatatgaatatgtgccctgatataaatatcaaggtaatgggaagcccaattaccctaatttgatatttacacattatatgaat

SEQ ID NO: 3015 - DNA, 119 bp, homo sapiens
atatatacttatattattgtaactataatatatgttatatattatatataattctataatatatgttatatattatatataattctataatatatagttatattattgtaactataata

SEQ ID NO: 3016 - DNA, 94 bp, homo sapiens
tttacaaacctttagctagacacagagcgctgactggtgagtttttacagagtgctgattggtgcatttacaaagctttagctagacacagagc

SEQ ID NO: 3017 - DNA, 110 bp, homo sapiens
ttgactgaaaactagttctcagcattttaacatattttcctctaaagatgtaagccgttggctgactgacttgactgaaaactagttctcagcattttaacagattttcc

SEQ ID NO: 3018 - DNA, 151 bp, homo sapiens
ccaaatgttattcaactagtgtataattatgaaagactgtagttttgacatctgtgtctttccctctcctcttaaatcttcctctgagtgaagcaagctgccaaatgttattcaactagtgtataattataaaagactgtagttttgacat

SEQ ID NO: 3019 - DNA, 84 bp, homo sapiens
ttttcatttatttttctaaattcaattaataattcaattattaatagtaaaacataaattttcatttatttttctaaatttaat

SEQ ID NO: 3020 - DNA, 107 bp, homo sapiens
gcccaccaccacgcccggctaatttttttttttgtatttttagtagagacggggtttcactgtgttagccaggatgcccgccaccacgcccggctaatttttttttt

SEQ ID NO: 3021 - DNA, 125 bp, homo sapiens
gaacataaattgtgaagatttcgtggacatttattagttcctcaaattaatacttttataattttttacgtctgtctttactgcaatctctgaacataaattgtgaagatttcatggacatttat

SEQ ID NO: 3022 - DNA, 124 bp, homo sapiens
atatatagaatatgtaaaacagatgacatttatgacaatatttaacattgcttacaatgagcacatattagtcatataatcaggaattcatatatagaatatataaaacagatgacatttatga

SEQ ID NO: 3023 - DNA, 93 bp, homo sapiens
ttaattctcatgattcatgatcatggtatacgtaaaatccaaaaaaataaaaactaaataatgttaattctcatgattcatgatcatggtata

SEQ ID NO: 3024 - DNA, 88 bp, homo sapiens
taatggaaaataagaagagtaaaaagaaccccagaaagtcaattatttgttataacagctaatggaaaataagaagagtgaaaagaac

SEQ ID NO: 3025 - DNA, 108 bp, homo sapiens
atgggtgtgaaaaggtatcacacctttgcacctctgcatagtctgttatacgtacctatgtgcctttgatggcccttacaatgggtgtgaaaaggtatctcacctttg

SEQ ID NO: 3026 - DNA, 160 bp, homo sapiens
tgttgaatttaggcttagcttcaggatttgttttggtcaacagaatgtgagtatgtgagtaaaagtggttttttttttgttttgttttgttttttcacttttcagcatgttgaatttaggcttagcctcaggatttgttttggtcaacagaatgtgagta

SEQ ID NO: 3027 - DNA, 89 bp, homo sapiens
tataataaaataaatatgtttatacatgtatatgtgtatccatgtttacacagtatgaaatactataataaaataaatatgtgtataca

SEQ ID NO: 3028 - DNA, 87 bp, homo sapiens
aaattcccaatgctgtgttgccacaatttttgctattgttgtttaacaataaattcaaatttgtaaattcccaatgctgtgttggcc

SEQ ID NO: 3029 - DNA, 104 bp, homo sapiens
aactttatagctgataaagttgtatcagctgtatcaggtgttagtaataggccaagtattataaagttagtaacaggctaactttatagctgataaagttgtat

SEQ ID NO: 3030 - DNA, 91 bp, homo sapiens
ggatctggaggggtggaagtcagcaatgggtgcttcactgaatcagaagcacagcagacaccctgctggatccggaggggtggaagtcagc

SEQ ID NO: 3031 - DNA, 92 bp, homo sapiens
tcatgtgagttaatacttaataataataactcatgtgattataattaataacttgtaataataattaactcgtgtgagttaatacttaataa

SEQ ID NO: 3032 - DNA, 139 bp, homo sapiens
gattagacctctttgttagcatctacagcaagacaagttaatagcttccaagttgtttgagataactaatttgacttatttatatggttacatttgattagacctctttgttagcatctacagcaagaaaagttaatag

SEQ ID NO: 3033 - DNA, 92 bp, homo sapiens
tgattggttgaagtttcaatccacagcttgcatctgtgactcattttggcttaggggaaagtcctttttgattggttgaagtttcaatccct

SEQ ID NO: 3034 - DNA, 124 bp, homo sapiens
gaacataaattgtgaagatttcatggacatttactagttccccaaattaatacttttataatttcttacgcctgtctttactgcaatctctgaacataaattgtgaagatttcatggacattta

SEQ ID NO: 3035 - DNA, 110 bp, homo sapiens
tgtttccagagaagaccttgaaaaaactcaggaatgtgttctaaggcaatgagatccagtatatgttatgaatgaatgatctattgtttccagagaaggccttgaaaaaa

SEQ ID NO: 3036 - DNA, 157 bp, homo sapiens
tcggcactctgtatctagctcaaggtttgtaaacacaccaatcagcaccctgcgtctagctcagggtttgtgaatgcaccaatccacactctgtatctagctactctggtggggccttggagaacctttgtgtccacactctgtatctagctaatct

SEQ ID NO: 3037 - DNA, 85 bp, homo sapiens
agctcagtcatcttaggcaggaggcagcttaagtgattatggcttcccctcccctgggcagctcagtcatcttaggcagcaggca

SEQ ID NO: 3038 - DNA, 98 bp, homo sapiens
gctgtatataagatgctatttctagcatgtatataagatgtatataagctgtatataagatgtatataagctgtatataagatgttatttctagcatg

SEQ ID NO: 3039 - DNA, 88 bp, homo sapiens
tatatgtacaatgattatacatatacaatgattagaggctgttatataaattctcatcattttattctatgtacaatgattagaggct

SEQ ID NO: 3040 - DNA, 103 bp, homo sapiens
tatactttcaggctagatgtcttttgggtcaagaagccgtacttgaaatgttataacaacttccttatctgctgtttatactttcaggttagatgtcttttgg

SEQ ID NO: 3041 - DNA, 142 bp, homo sapiens
cccaactacgtgctgcctgcaagaaacttacttcacctataaagactaaatttctaattaaaatacatcaagttgttccatatattttttaaaattcccaactacatgctgcctgcaagaaacttacttcacctataaagac

SEQ ID NO: 3042 - DNA, 91 bp, homo sapiens
ggtcctcaaatactgataactcttctatctgtggaagactatattcccataaatttcaggtcctcaaatactgataactcttctatctgtg

SEQ ID NO: 3043 - DNA, 105 bp, homo sapiens
caatattttaaaatacatagtgaaaaggaaggaaggaagggctggataaaataacattagagatattgattaatgaggcaatattttaaaatacatagttaaaag

SEQ ID NO: 3044 - DNA, 79 bp, homo sapiens
tgggaaagtttgaaacttcctagaaacattgagggctcagaagacagaagaaatatgggaaggtttgaaacttcctaga

SEQ ID NO: 3045 - DNA, 78 bp, homo sapiens
aaacacataagcatattcaatgattatttaaaaaaccttttacatacatgaaaaaacacataagcatgttcaatgatt

SEQ ID NO: 3046 - DNA, 93 bp, homo sapiens
atatttcttgatgttctctaataatatttttaatcataatagttaaattttgaaaacagcataatatttattgatgttctctaataatatttt

SEQ ID NO: 3047 - DNA, 79 bp, homo sapiens; identical to SEQ ID NO: 3044

SEQ ID NO: 3048 - DNA, 78 bp, homo sapiens; identical to SEQ ID NO: 3045

SEQ ID NO: 3049 - DNA, 93 bp, homo sapiens; identical to SEQ ID NO: 3046

SEQ ID NO: 3050 - DNA, 89 bp, homo sapiens
agcaaggaaattgagaaagtgtgatgtgaaaggagtccaggagaaaatgagaaaagagaaaatgagcaagaaaattgagaaagtgtgat

SEQ ID NO: 3051 - DNA, 94 bp, homo sapiens
aaattatatttattatattgctgttataacattataacagcatttaaaaattatatttttaaaaaattatatttattacattgctgttataaca

SEQ ID NO: 3052 - DNA, 81 bp, homo sapiens
gaaagtttggaacttcctagagacttggagggctcagaagacaggaagatatgagaaagtttggaacttcctagagacttg

SEQ ID NO: 3053 - DNA, 77 bp, homo sapiens
gtttggaacttcctagagacttggaggactcagaagacggaaagatgtgggaaggtttggaacttcctagagacttg

SEQ ID NO: 3054 - DNA, 124 bp, homo sapiens
atcaaagttccaaaacaaaactataattagttggatctctaatggaaaatataggtatagtgaagttttaaaaacttctctgtgtcatacatcaaagttccaaaacaaaagtataattagttgg

SEQ ID NO: 3055 - DNA, 77 bp, homo sapiens
taactaatagttaaaacacaatacattatgtccctagtgagggacattatgttaactaatacttaaaacacaataca

SEQ ID NO: 3056 - DNA, 132 bp, homo sapiens
tttccatttacttaccagaacttaggagtatgctggactctgaaaggagatataagagggaatattaaggatctaagttgagagttttgccctatttttccatttacttactagaacttaggagtatgctgg

SEQ ID NO: 3057 - DNA, 144 bp, homo sapiens
tgggtaaagaagagaaaagactttcctgacagttcttaggcacaagacatggtgaaaccctgtctccactaaaaaatacaaaaattagccaggtgtgggtaaagaagagaaaatactttcctgacagttcttaggcacaagaca

SEQ ID NO: 3058 - DNA, 106 bp, homo sapiens
gcacaaacaacccctgcccaagaacctgcaacagtccctggaccctgctgatcggaatagttgcactcactgatgcagctgcagaaacaacccctgcccaagaacc

SEQ ID NO: 3059 - DNA, 99 bp, homo sapiens
gaaagggcccaatataatgaattaaatgatacacaacaaattaaatgataaataatacacaactttctagattgaaagggcccaatataatgaattaaa

SEQ ID NO: 3060 - DNA, 94 bp, homo sapiens
attctcataggagccacagacctcattaccgcctgagctctgcctcccgtcagaatagcagaggcattaaattctcataggagccacaaacctc

SEQ ID NO: 3061 - DNA, 175 bp, homo sapiens
cccctggtgccacagctgaggcagcatcccacccccaggactacccagcctccttcacatcagagcagtcacatccccttggtgccacagctgaggcagcactttgctcctaggcaccccaggtctgctgcacaccacagcagttgcgccccttagcaccacagctaaggcagtg

SEQ ID NO: 3062 - DNA, 93 bp, homo sapiens
ttataaaagggcttgaggttgaagaatgggatcaaccatgagcagagccctcatgggatcagcaccttataaaagggcttaaggttgaagaat

SEQ ID NO: 3063 - DNA, 83 bp, homo sapiens
gagtaagcaagggagggaggaagaaagggaagaaggagaaagtatgtggaggggagaggaaaggcagagaagggagaggaaga

SEQ ID NO: 3064 - DNA, 104 bp, homo sapiens
ctaaacacattcataagacccttaaaataattctttctgaaatatggaaagaattcctttctggccttatgctaaacacattcataagacccttaaaataattc

SEQ ID NO: 3065 - DNA, 87 bp, homo sapiens
tagtgatgtctacccagcaccaggactgcgcaggctgagcagaatagggtgccagcatagactagtgatgtctgcccagcaccagga

SEQ ID NO: 3066 - DNA, 86 bp, homo sapiens
tgtccctccagtctgtgtggcacatatggccaattgagctgctcccacccttagctctgtcttgtccccccagtctgtgtggcaca

SEQ ID NO: 3067 - DNA, 96 bp, homo sapiens
tattagcatttgatttcatgtaattttcatgaattggtgatgtggaactgaactgaatattgatgggtattagcatttgatttcatgtaattttca

SEQ ID NO: 3068 - DNA, 110 bp, homo sapiens
ggaaaatctgttaaaatgctgagaactagttttcagtcaagtcagtcagccaatggcttacatctttagaggaaaatctgttagaatgctgagaactagttttcagtcaa

SEQ ID NO: 3069 - DNA, 151 bp, homo sapiens
atgtcaaaactacagtctttgataattatacactagttgaataacatttggcagcttgcttcactcagaggaagatttaagaggagagggaaagacacagatgtcaaaactacagtctttcataattatacactagttgaataacatttgg

SEQ ID NO: 3070 - DNA, 109 bp, homo sapiens
tatgcataaagcagtgaaaattagatgtagataaatagggagattaataaactgtatatgtgtatacaaccacagcagttgtatgcataaagcagtgaaaattaaatgt

SEQ ID NO: 3071 - DNA, 103 bp, homo sapiens
ggagattaaaaagacaataaatatttcttgtcacactagaatcacagatatcatcctaattgatgaatttagcaagacatggagattaaaaagataataaata

SEQ ID NO: 3072 - DNA, 78 bp, homo sapiens
taaaacctttgataataataatattgttattaataaaattgtgctccatttgataataacctttgataataataatat

SEQ ID NO: 3073 - DNA, 121 bp, homo sapiens
atttgggatttggttggcaaattgaaaacactctaacaaaacatatttagtgaacacttcaaaaatgatgatttaaacatttggggtttggttggcaaattgaaaacactctaacaaaaca

SEQ ID NO: 3074 - DNA, 91 bp, homo sapiens
tctagaagtttgaaataccagtagagttttaactttaatttcatttttcattaaattggaaaatatctagaagtttgacataccagtagag

SEQ ID NO: 3075 - DNA, 92 bp, homo sapiens
gctggaaacagcacagtatctgactttaaagtatattacaaggctatagtaattaatacagcataagctggaaacagcacaatatctgactt

SEQ ID NO: 3076 - DNA, 186 bp, homo sapiens
agctagatacagagtgtcaattggtgcattcacaaaccttgagctaaacacagggtgctgattggtgtgtttacaaaccttgagctagatacagagtgccgattggtgtatttacaatccctgagctagacataaaggttctccaaggccccaccagagcagctagatacagagtgtcgattggtg

SEQ ID NO: 3077 - DNA, 107 bp, homo sapiens
atctgtctctccatctatcaatccatccatccgtccatccatccatccatccatccatccattcgtcactttctcttatcctcattccaagtatccatgcatccatc

SEQ ID NO: 3078 - DNA, 87 bp, homo sapiens
tggaattttcacttctacctagcactcaaagaattttaatttgagaaccctggagtgagacctggaattttcacttcgacctagcac

SEQ ID NO: 3079 - DNA, 92 bp, homo sapiens
tgatatgtccatataatggaatactacccattcatataatgaacatatcacatgtccatattccatatatgacatgtccatataatggaata

SEQ ID NO: 3080 - DNA, 103 bp, homo sapiens
gtcctgctaatataatggcacatattttttggaatttagaattactgttaaggtctacagcaagctaaaaggagtcctgctaatattatggcacatatttttt

SEQ ID NO: 3081 - DNA, 110 bp, homo sapiens
ggcctcccaaagtgctgggattacaggcgtgagccaccgtgcccggccggtctcaatctcttgacctcgtaatccgcctgccttggcctcccaaagtgctgggattacag

SEQ ID NO: 3082 - DNA, 81 bp, homo sapiens
tgggcgacaaaagcaaaactccatctcaaaataaaaaaaataaaataaaataaaatgggcgacaagagcaaaactccatct

SEQ ID NO: 3083 - DNA, 113 bp, homo sapiens
tcatatagggaacactggtggatgtagacagtatcctaaacaaaaaacacaatcaatcaaacttttcccaggaccctcatatagggaacactggtgaatgtagacagtatcct

SEQ ID NO: 3084 - DNA, 122 bp, homo sapiens
ttccattatttttttcattccagtggttgtattatttttttcattccagtggttgcattatttttttcattccagtaaaatttgcttatattatagcatttgttgctttttgttattccatt

SEQ ID NO: 3085 - DNA, 103 bp, homo sapiens
ggaggtgaaggggaagcaagtcacatcttacttggcggcaggagagggagacagagagaggaaatttacaatcatggctggaggtgaaggggaagcaaggcac

SEQ ID NO: 3086 - DNA, 86 bp, homo sapiens
gtaatttggctaacaaatatccatcttccctaatgtcaatcagttttcctatcaaactagtaatttggctaacaaatattcatctt

SEQ ID NO: 3087 - DNA, 96 bp, homo sapiens
tctagttggtagagaccagagatgctactaaacatctaacaatgcacaaaagtgctgaagtccaactgtatctagctggtagagaccagagatgct

SEQ ID NO: 3088 - DNA, 138 bp, homo sapiens
ttcagctctcagcagagagggcaggtcctctctgcagctggtcatcccttcatctcttcagctctcagcagagagggtagctcttcttttctaggcaggtcatcccgataagcatccagctctcatcagagagggtag

SEQ ID NO: 3089 - DNA, 90 bp, homo sapiens
tgatttatattcagttctgagaagacaatcggggttgtagaaattaattcctatgatatttgatttatattcagttctgagaagacaatc

SEQ ID NO: 3090 - DNA, 94 bp, homo sapiens
ttagctagacacagagcgctgattggtgcgtttttacagaggatgattggtgcgtttacaaacctttagctagacacagagcactgattggtgc

SEQ ID NO: 3091 - DNA, 92 bp, homo sapiens
aaacagtcaaatttattagatgtctttaaaaggttgtttcaactatcatttccaattatccaaccaaacaaatagtcaaatttattagatgt

SEQ ID NO: 3092 - DNA, 81 bp, homo sapiens
tctaggaagttccaaactttcccacatactcctgtcttctgagccctccaagtctctaggaagttccaaactttccaacat

SEQ ID NO: 3093 - DNA, 130 bp, homo sapiens
ctgtaatccaagctacttgggaggctggacaggagaaaccccgtctctactaaataaaaaaaaaaaaaactagttgagcatggtggcccatgtctgtaatccaagctacttgggaggctgagacaggaga

SEQ ID NO: 3094 - DNA, 157 bp, homo sapiens
aaattctgtaaaatatttggagagatttaagctgagcccaatatgaatgaccaaggacactaatctcacttatgacttattacctttgttgataaaaagagtgaaattctgtaaaatatttgaagagatttaagctgagcccaatatgaatgaccaa

SEQ ID NO: 3095 - DNA, 115 bp, homo sapiens
taatcccagcattttgggaggccaaggcaggtggtccatttgatgtcaagagttcgagaccaggctgggcgtggtggctcacgcctgtaatcccagcactttgggaggccaaggc

SEQ ID NO: 3096 - DNA, 82 bp, homo sapiens
agtgcctttaagtgctaattagctaagggcatcttagcctttactctaacaaataccagtgcctttaagtgctaattagcta

SEQ ID NO: 3097 - DNA, 73 bp, homo sapiens
tggatatattcaaatatacacacacaaaagagggaatctaatatcattatggatattttcaaatatacacaca

SEQ ID NO: 3098 - DNA, 89 bp, homo sapiens
atggtttggctgtgaatgagttacaattctctcgtaactcatcaggtcaatagtgaccctgacatggtttggctgtgaatgagttacaa

SEQ ID NO: 3099 - DNA, 112 bp, homo sapiens
gagggcaccagctagactgatttgagtagaagaattaatgaaaagtaagaaaatggaaatagcagatgcaggactgacagtgggagggcaccagctagactgatttgagtag

SEQ ID NO: 3100 - DNA, 89 bp, homo sapiens
aattgcatgttatttagttaacatcctaatgttggacaaaataaaacgaggcaatgcaacaataattgcaagttatttagttaacatcc

SEQ ID NO: 3101 - DNA, 83 bp, homo sapiens
aagttccaaactttcccacatcttcctgttttctgagccctccaagtctctagaaagttccaaactttcccacattttcctgt

SEQ ID NO: 3102 - DNA, 696 bp, homo sapiens
tgaaggccttcccacactcattacacatgtaaggtttttctccattatggattctctgatgaataagtaggtatgagctacatgtgaaggccttcccacattcattacacacaaaaggaagatctccactgtgaattctctggtggacaaaaaggcaagagagctgactgaaggcttgcccacattcactgcagtcataaggtttctctgcagtgtgaattatctggtacataataaggtgtgaaaaacaactaaaggttttcccaaactcacactcatatggcttctcaccagtatggcttcgctgatgtacaataagatttgcaatctgcgtaaaggctttgccagaatcgttacaggcagagggcttctccccagtgtggatcctctggtggacaatatggtttgagctcccagtaaatgttttccgacactcattacatttacagcatttttctgtaatgtggagtttctggtgccgagcaagttgtgagctataactaaaggctttctcacatttactacgcctaaaggttttttctaaggagaggtttttttgatatacagtcagatttgaactctgattgaaggctttcccacattttgagcaaacataaggtttctgtccagtgtggattctctgatgcacatcgagctttgcactctgaatgaaggccttcccacactcatgacatt

SEQ ID NO: 3103 - DNA, 120 bp, homo sapiens
ttatctaggaataagaattgtccattttctacctattgagaatcaaaacattcacagaacataaacctacttgtttcaaatatggtagttatctaggaataaggattgtccattttctac

SEQ ID NO: 3104 - DNA, 92 bp, homo sapiens
tgaattgaagactttatcattatataatagtagttaggtaattatatagtagttaggtaattgctgaattgaagcctttatcattatataat

SEQ ID NO: 3105 - DNA, 84 bp, homo sapiens
tttagttcttcctctccaaagtactaggagcaagaagtctatgatggagatcattccttatttagttcttcttctccaaagtac

SEQ ID NO: 3106 - DNA, 89 bp, homo sapiens
acaggagccatcagaaggaactggggatttcacaaagggaaccagggatttcctgggatttcacaggagccatcagagggaactgggga

SEQ ID NO: 3107 - DNA, 78 bp, homo sapiens
aaatccccataaacagaggaatggttgattaaatttttaccatgaatttatataaaatccccataaacagaggaatgg

SEQ ID NO: 3108 - DNA, 98 bp, homo sapiens
gtgcatttacaaacctttagctagacacagagtgctggttggtgtgtttttacagagtgctgatttgtgcatttacaaatctttagctagacacagag

SEQ ID NO: 3109 - DNA, 105 bp, homo sapiens
aaaaaatttacatttctaataagttatattatatttatatttctaataagttcctaggtgatattgatgccattaacctgaaaaaatttatatttctaataagtt

SEQ ID NO: 3110 - DNA, 94 bp, homo sapiens
agcactctggaaaaatgcaccaatcagcactttgtgtctagctaaaggattgtaaatgcaccaatcagcactctgtaaaaatgcaccaatcagc

SEQ ID NO: 3111 - DNA, 125 bp, homo sapiens
gaacataaattgtgaagatttcatggacatttattagttctccaaattaatacttttataatttcttacgcctgtctttactacaatctctgaacataaattgtgaagatttcatggacatttat

SEQ ID NO: 3112 - DNA, 161 bp, homo sapiens
acatcctgctgattggtccattttacagagagctgattggtccattttacagagtgctgattggtccgtttgacagagtgctgattggtctcttttgacagagtgctgattggtgcgtttacaagcctttaggtagacacagagtgctgattggtgcattt

SEQ ID NO: 3113 - DNA, 108 bp, homo sapiens
caccaatcggcactctgtatctagctcaaggtttgtaaacacacgaatcagcaccctgtatctagctcagggtttgtgaatgcaccaatcgacactctgtacctagct

SEQ ID NO: 3114 - DNA, 99 bp, homo sapiens
aaatacattactggacacatacaacttcccaagattgaatctgtaggaaataagaaaggacgtagaggaaataaatacattgctggacacatacaactt

SEQ ID NO: 3115 - DNA, 95 bp, homo sapiens
catgcacatattatatcattatataatttgatatatttttatatataatttgatacatgcacatatatcattcatgcacatattataccattata

SEQ ID NO: 3116 - DNA, 101 bp, homo sapiens
tttaagaaagatattattatacttattataataatatcgtataatacataggacttgtcccatacatagtcccaagatttaagaaagatattatgatactt

SEQ ID NO: 3117 - DNA, 96 bp, homo sapiens
gtggtttgtggtgccccaaaccaatacaatacatttatcaattaaggtcctcatggcatatgggagtggtttgtggtgccccaaaccagtacaata

SEQ ID NO: 3118 - DNA, 82 bp, homo sapiens
attttaataagaatgttatttatttgtgacctaccttgaaatataatagcacaaaagaaattttaataagaatgttatttat

SEQ ID NO: 3119 - DNA, 74 bp, homo sapiens
ataatctgtacatgcgttttcatggtggtgtcctggagataagaaaacacaataatctttacatgcgttttcat

SEQ ID NO: 3120 - DNA, 128 bp, homo sapiens
gtcccctttgtggtctaggaggacaggcaagagtgcaggtttttgagaatgcatcagtaagggccactaaatccaatttttctcagtcccctttgtggtctaggaggacagacaagagtgcaggtttt

SEQ ID NO: 3121 - DNA, 64 bp, homo sapiens
aaatgcaacaatcagtgctctgtgtctagctaaaggattgtaaatgcaccaatcagcactctgt

SEQ ID NO: 3122 - DNA, 74 bp, homo sapiens
atatcagaaatgacgcaacatttctacttgcaacttcccaaggtcctcattatatcagaaatgacgcaacattt

SEQ ID NO: 3123 - DNA, 110 bp, homo sapiens
gtgataaatgcagcattccaaattggtgagttaatggatttttaaatcaagctccagagtgcatatataagtatacgtgataaatgcagcatttcaaattggtgagttaa

SEQ ID NO: 3124 - DNA, 75 bp, homo sapiens
cttggcaagcacagcaacaggtcggggagctgatggccaccatgtccccagtcttggcaagcacagcaacaggtc

SEQ ID NO: 3125 - DNA, 109 bp, homo sapiens
catgtagcaaaataccacatgcacccaacactcaagatgatgaataccctaaattccctgacttgattattgcacttcctactcatgtagcaaaatatcacatgcaccc

SEQ ID NO: 3126 - DNA, 124 bp, homo sapiens
ggatttagtggcccttactgacacattcttgaaaacctgcgcccttgcctgtcctcctagaccacaaagaggaccaagaaaaattggatttagtggccctaactgacacattcttgaaaacctg

SEQ ID NO: 3127 - DNA, 93 bp, homo sapiens
tctcaaaattctcattctttttccaagaatttaccatatccacttgaggaactaacacacaggacttctcaaaattctccttctttttccaag

SEQ ID NO: 3128 - DNA, 108 bp, homo sapiens
tagatatgcacaatggtacagtcactttaggagccacctaatttaggagccactgcacctaaattagatttttaaaaaacttggtagatatgcaaaatggtacagtca

SEQ ID NO: 3129 - DNA, 109 bp, homo sapiens
aattggagaccagcctgggcaacacagggagactcttgggaggctgaggcaggaggctcacttgaggcccggaattggagaccagcctgggcaacacagggagactctt

SEQ ID NO: 3130 - DNA, 81 bp, homo sapiens
agtcaaacaaaacatcatcaaaaaataataggactatttagagtttaacataacagtcaaacaaaacatcatcaaaaaata

SEQ ID NO: 3131 - DNA, 71 bp, homo sapiens
gtccttcttattaatgtattcttattaatgtatttatttcttattaatgtatttcttattaatgtccttct

SEQ ID NO: 3132 - DNA, 86 bp, homo sapiens
cagcactgctagagacttagaagtgggtgcatggagagatatttttttcttgcctattgccagcactgctagacacttagaagtgg

SEQ ID NO: 3133 - DNA, 91 bp, homo sapiens
ctggcagtgatttccattcatgagtctctgctgtggtaaattatgactcctactggttcctggcagtaatttccattcatgagtctctgct

SEQ ID NO: 3134 - DNA, 61 bp, homo sapiens
ttgtccagagagagagagagagagagagagagagatggagagagagagagagagagagaga

SEQ ID NO: 3135 - DNA, 95 bp, homo sapiens
tatccttgcatatttaggataaatcccacttggttcatttttgtgctattgattgatttttgtgctatccttgcatacttaggataaatcccact

SEQ ID NO: 3136 - DNA, 157 bp, homo sapiens
attccagaaagcctttagttcatcagacaaggtgtagggtgtgtgtgtcagtttcattttctggtagacactcctactctttatgaatggttccatcataggcattccagaaagcctttagttcatcagacaaggtgtagggtgtctgtgtcagttt

SEQ ID NO: 3137 - DNA, 145 bp, homo sapiens
aagtgtctgttcatgtccttcgcccactttttgatggggttgtttttttcttgtaaatttgtttgagttcattgtagattctggatattagcccttaagtgtctgttcatgtccttcgcccactttttgatggggttgtttgttt

SEQ ID NO: 3138 - DNA, 108 bp, homo sapiens
agctagacacagagcactgattggtgcatttataaaccttgagctagacacagggtgctgattggtgtatttacaaaccttgagctagacacagagtactgattggtg

SEQ ID NO: 3139 - DNA, 77 bp, homo sapiens
caagtctctaggaagttcaaaactttcccacatcttcctatcttctgagccttccaagtctctaggaagttccaaac

SEQ ID NO: 3140 - DNA, 106 bp, homo sapiens
aggcatgagagaattgtataaagtggggtggggaggatacaatttaaactgtttttaagaaaagatataaaagtaaagtgaggcatgagagaattgtataaactgg

SEQ ID NO: 3141 - DNA, 108 bp, homo sapiens
tagatgtaaagaaatccacttcgtgccagtttgcaaggaaattttcctttatgaagagcagagcacttaatagatgtaaagaaatccacttcgtgccagtctgcaagg

SEQ ID NO: 3142 - DNA, 100 bp, homo sapiens
ttaatattgatatgtgaggttttattcttgccatagtgttttaacataaaatattaactttggccatgcaaagttaatattgatatgtaaggttttattc

SEQ ID NO: 3143 - DNA, 179 bp, homo sapiens
ccattttacagagtgctgatttgtccattttacagagtgctgattggttcatttttacagagtgctgattggtgcgtttacagtcctttagctagacccagagtgctgattgatgcatttttacagagtgcggattggcgcatttacaatcctttagctagacacagagcgctgattgg

SEQ ID NO: 3144 - DNA, 180 bp, homo sapiens
cctgctgattggtccattttacagagtgctgattggtccatttttacagagtgctgattggtgcgtttacaaacctttagctagacacagagcactgattggtgcgtttttacacagtgctgattggtgcatttacaaatctttagttagacacagagtgctcattggtgtgtttacaat

SEQ ID NO: 3145 - DNA, 675 bp, homo sapiens
gatttggaagaaactgaaagagaaatatccccacaggaaaatggcctagaggaggttaagcctctaggtgaaatgcaaacagatttgaaagcaaccggaagggagatttccccaagggagaagacaccagaggtgattgatgccactgaggaaatagacaaagatctggaagaaactggaagaagagaaatatccccagaggaaaatggcccagaggaggtcaagcctgtagatgaaatggagacagacttgaaaacaactggaagagagggttcctcaagggagaagacacgagaggtgattgatgctgctgaggtaatagagacagatttggaagaaactgaaagagaaatatcgccacaggaaaatggcccagaggaggtcaagcctgtaggtaaaatggagacagatttgaaagaaattagagaagaaatttcccaaagggaaaaggtgctagcagagttcagtgctataagggaaaaggagattgatttgaaagaaactggaaaaagagacattcccatcatggagaaagtatcaggaaagatggctgttgttgaagaaatggaggcagatttgaaagaaactggaaaagaaaattttagagagagaggatctgaagagatctgtgttactgaggaaaaggtggcagaattgaaacaaactggaaaaaca

SEQ ID NO: 3146 - DNA, 140 bp, homo sapiens
ggggagctaagtctacccctccctctctctctactttgtttcagtagcagacttcgctgttagatactttctccatacatacaaggtcaggggagctaagtctacccctccctctcactctactttgtttcagtagcaga

SEQ ID NO: 3147 - DNA, 93 bp, homo sapiens
caatgtggctgtaccattttgtatttaagtgtaagtttgattttataaaaaactgccaagatattttgcaatgtggctttaccattttgtatt

SEQ ID NO: 3148 - DNA, 89 bp, homo sapiens
tatacacacataacctagagcttaaatgggaaaggcgacctatatgtatatgtattatgtatacacacataacctagagctaaaatggg

SEQ ID NO: 3149 - DNA, 144 bp, homo sapiens
tattaaaatttgggaaaaatttaaagtaatatagggaaaaacaacttccaactcccaatctaaaccattcatttttttccctcagatttttgtctgctattaaaatttgggaaaaatttaaagtaatataggggaaaacaactt

SEQ ID NO: 3150 - DNA, 73 bp, homo sapiens
tttatttattttgagacggagtctatttatttatttatttatttatttgtttatttattttgagacggagtct

SEQ ID NO: 3151 - DNA, 88 bp, homo sapiens
tagacagctacattctaaacttaattttaatacattgctttagacttacaaaccgaaggtctagtagacagctacattctaaacctaa

SEQ ID NO: 3152 - DNA, 90 bp, homo sapiens
ggaaaatataactgcctgatagtgatttagtcatagggatgcagtaaaaagagcatccaagggaagatataactgcctgatagtgattta

SEQ ID NO: 3153 - DNA, 96 bp, homo sapiens
tacaaggtgaagacagtgaagaatccttactgttccttccttccttgcttctttccttccttccatccttcctacaaggtgaagacagtgaagatt

SEQ ID NO: 3154 - DNA, 75 bp, homo sapiens
aattaaattgcataattataatttcaaattataattaaattaaattgcataattataatttcaaattataattaa

SEQ ID NO: 3155 - DNA, 129 bp, homo sapiens
taattcctttttatggctgagtagtattccatgttgtgtgtgtatgtatacacacacacacacacacatatatatagtagtatatataattcctttttatggctgagtagtattccatggtgtgtgtgt

SEQ ID NO: 3156 - DNA, 145 bp, homo sapiens
agttcccaaaattaatacttttataatttcttatgcctgtctttactgcaacctctgaacataaattgtgaagatttcattttaatatggacatttataagttccccaaattaatacttttataatttcttatgcctgtctttac

SEQ ID NO: 3157 - DNA, 112 bp, homo sapiens
gagagatattggaattatgagtgtgtggttgtattagttcatttttacactgctataaagacatgcctgagactgagagatattggaattatgagtgtgtggttgtattagt

SEQ ID NO: 3158 - DNA, 127 bp, homo sapiens
gcatatagaaagcactatatatatatatatagtgcttctacctataacatatatatatatgcatatagaaagcactaaatatatagccacaagccacaaaccacaagccacaagcactatatatata

SEQ ID NO: 3159 - DNA, 78 bp, homo sapiens
ctaaaaaactgttggaactaatacataaattcagtaaatacagaaatagactctactaaaaaactgttagaactaata

SEQ ID NO: 3160 - DNA, 90 bp, homo sapiens
tatgggatgcacattcttacatttgtaagatgtaatgtgaaaacacaacataccaaaacttatgggatgcacactcttacatttgtaaga

SEQ ID NO: 3161 - DNA, 112 bp, homo sapiens
ccctcctaaacacatgcacacacatgtacataactttcatgtcctcgatacctggcaaacagtgtccccgctttctcctctcacccctcctaaacacacgcacacacatgta

SEQ ID NO: 3162 - DNA, 114 bp, homo sapiens
tcataataataaaatattatgtgaggttgaaaatttccttatctttaaaagggctataataatacttatcttgtgtacttttcgtcataataataaaatattatgtgaggttga

SEQ ID NO: 3163 - DNA, 86 bp, homo sapiens
tcttaacttccttaaaatataacttccttaaaatataactgacaacatcaaattaaaatatatcttaacttccttaaaatataact

SEQ ID NO: 3164 - DNA, 71 bp, homo sapiens
cagctgctgaaatggcctgctgtaccccctaagaccagttctaactagcagctgctgacatggcctgctgt

SEQ ID NO: 3165 - DNA, 158 bp, homo sapiens
tagcataagtatgtcccaagtattttataagtatgtataagtatgtcccaagtattgtataagtattgtatagtataagtatgtcccaagtatgcctagttaaatttgaatttcagataagcaacaaataatttttagtctacatatttcccaaatat

SEQ ID NO: 3166 - DNA, 99 bp, homo sapiens
aaagaaaacaaacaaacaaaaaaagccgagttacataaaatatatccgaccgaattaaggcataactggcatccttaaaaacaaacaaacaaaaaaacc

SEQ ID NO: 3167 - DNA, 75 bp, homo sapiens
aaaaccacaattacttttgcaccaatctaatataaattatttgtaatggcaaaaccacaattacttttgcactaa

SEQ ID NO: 3168 - DNA, 126 bp, homo sapiens
gagatggcagcagtacagtccagcttcggctccgcatcagagggagaccgtagaaagagagggagagggagaccgtggggagagggagatggcagcagtacagtccagcttcggctcggcatcaga

SEQ ID NO: 3169 - DNA, 125 bp, homo sapiens
gaacataaattgtgaagatttcatggacatttattaattccccaaattaatacttttataatttcttatgcctgtctttactgcagtctctgaacataaattgtgaagatttcatggacacttat

SEQ ID NO: 3170 - DNA, 84 bp, homo sapiens
gttgctgagtggtgttctgatgtgaactaatctatttccctgctaagaccaacctattctgttgctgagtggtgttctgttgtg

SEQ ID NO: 3171 - DNA, 101 bp, homo sapiens
tattctctatatcactgctatttacaaacaaaaaagatattatccatatcactgagatttacaaacaaacaagatattattctctatatcactactattta

SEQ ID NO: 3172 - DNA, 74 bp, homo sapiens
ttataatacaatggggattatactggtttccacaagattagcaaagcactcttataatacaatggggtttatac

SEQ ID NO: 3173 - DNA, 105 bp, homo sapiens
aaatttcaagttctatagagttatttcaagttctatacagttctatagagttatttataatatataatataatatacttataaatttcaagttctatagagttat

SEQ ID NO: 3174 - DNA, 101 bp, homo sapiens
ggtttggaatacctttaggtattggaatgcctttagatattgtgtctaaaaagtcatcaccatagccaaggtctggtgtattggagtgcctttagatattg

SEQ ID NO: 3175 - DNA, 132 bp, homo sapiens
atttagccctgtgccatcttatttatttagccctgtgccatcttatttaaccccagaaatttagccctgtgccatcttatttaaccccagaaatttagctcttatgtatttagccctgtgccatcttattta

SEQ ID NO: 3176 - DNA, 73 bp, homo sapiens
agtttattaaactctttgctcatttgtttattaaacatttattaaactatttgttaaactctttgctcattac

SEQ ID NO: 3177 - DNA, 99 bp, homo sapiens
cttgctttcgatttatctattatgcaaatagataactgcataattataattaaaaatagataattgcatattatcttgctttggatttatctattatgc

SEQ ID NO: 3178 - DNA, 169 bp, homo sapiens
tatttagtgcctttacatttttatttaatattctgatttttggataccaaaaacaattgctctgaagcctgtctgatcttttttatttaatgcctttacataatttttatttaatgcctttacagaatttttatgtatttaacatttaatgcctttacaatatttaatg

SEQ ID NO: 3179 - DNA, 74 bp, homo sapiens
agataacaaatgttggtgaggatgtggagggctgtaataaaatacacagataataacaaatgttggtgaggatg

SEQ ID NO: 3180 - DNA, 159 bp, homo sapiens
tcaaatgctttttcacatttacgtaacttaagtaaaatttgtaataaataagcttaggaaaataaaagcacttgaatcaaatgctttatcagaaaagaaaaagactagtcaaatgcttttacacatttacgtaacttaagtaaaatttgtaataaataa

SEQ ID NO: 3181 - DNA, 134 bp, homo sapiens
tggccacaggtgggatacagcaccaagtgggctcttggggtccctgattctaccagctaggttcttggggtcttgcactttaggtacccacctggccacagggggatacagcaccaagtgggctcttggggtcc

SEQ ID NO: 3182 - DNA, 115 bp, homo sapiens
gagaatgcatcattaagggccactaaatccgatttttctcagtccttcttgtggtctaggaggacaggcaagtgtgcagatttttgagaatgcatcagtaagggccactaaatcc

SEQ ID NO: 3183 - DNA, 88 bp, homo sapiens
ggttgtctcttttctgtgatgctaacagaaaatcggagtatgcgaagttttgtaggatgtttggttgtctcttttctgtgatgctaac

SEQ ID NO: 3184 - DNA, 71 bp, homo sapiens
ctactaaaatacaaaaaattagcagggcgtagagaatttttgtgttccctactaaaatacaaaaaattagc

SEQ ID NO: 3185 - DNA, 97 bp, homo sapiens
atttgtaatttaattcacaagaagaaaatgaataaaaattcaaaaaaaattctaagttttacatttgcaatttaattcacaagaagaaaatgaataa

SEQ ID NO: 3186 - DNA, 87 bp, homo sapiens
agttaaagtagttaacttttaatataaaaaaatttattttaagttaaaataaatacttttaagttaaaatagttaacttttaatata

SEQ ID NO: 3187 - DNA, 107 bp, homo sapiens
agagggagaccgtggaaagagagggagagggagagggagagagagggagagggagaccgtggaaagagagggagagggagaccgtggaaagagagggagagggagag

SEQ ID NO: 3188 - DNA, 79 bp, homo sapiens
gttttttccacttaggaaactaacacaagtttttctaattttttcccaaacctagtgttttttccacttaggaaactta

SEQ ID NO: 3189 - DNA, 81 bp, homo sapiens
catactaactggtacataaatacgtgccatgaaattatgcatgtaaggacttagcatactaactggtacataaatatgtgc

SEQ ID NO: 3190 - DNA, 103 bp, homo sapiens
agtctctcaaaggtctacctctggtttgcaacctatctaagtctctcaaaggtctacctctggtttgcaacctatctaagtctctcaaaggtctacctctggt

SEQ ID NO: 3191 - DNA, 78 bp, homo sapiens
ttaactctcctttctaataaaggaggattgttatctttttctgttacctctgttaaccctcctttctaataaaggagg

SEQ ID NO: 3192 - DNA, 69 bp, homo sapiens
ccgggagggaggtgggggggtcagccccccgcccggccagtcgccccgtcagggaggtgaggggcgcct

SEQ ID NO: 3193 - DNA, 123 bp, homo sapiens
aaatgttcatgaaatcttcacaatttatgttcagagactgcagtaaagacaggcataagaaattataaaagtattaatttggggaactaacaaatgtccatgaaatcttcacaatttatgttc

SEQ ID NO: 3194 - DNA, 85 bp, homo sapiens
ccccagtggtaagctgtttactaatataccccgtatttacttttatctagttctaccccagtggtaagctgtttactaatatacc

SEQ ID NO: 3195 - DNA, 97 bp, homo sapiens
cagcctccacaattgtgtgagccaattccttaaaataaatctctctttctctctctctctctatatatatgccagcctctacaattgtgtgagccaa

SEQ ID NO: 3196 - DNA, 115 bp, homo sapiens
ctttgggtaagtggtggggtcctgtaacatctttctggtgacacagaagggactatagagcagaaaccctgacccaatggctacctttgggtaagtgctggggtcctgtaacatc

SEQ ID NO: 3197 - DNA, 122 bp, homo sapiens
cagccaacagacacatgaaaaaatgctcatcatcgacttgaggcagttccaagatggccgaataggaacagctccagtctacagctcccagccaacagacacaggaaaaaatgctcatcatc

SEQ ID NO: 3198 - DNA, 85 bp, homo sapiens
agatgaatgttgtttctaaaggtgtaaacacctgaggaggtgtaactggagtttggctttgaagatgaatgttatttctaaaggt

SEQ ID NO: 3199 - DNA, 93 bp, homo sapiens
aagcttcacagaaacaatgacatatcaacttggcaagatgatgaccttctctcccggaagagtcgtggaaagcttcacagaaacaataacata

SEQ ID NO: 3200 - DNA, 107 bp, homo sapiens
tttttaaaataacagccgaatttatattattggtgaataatactattcaccattattttaaacaacagttttttaaataacagccgaatttatattattggtgaata

SEQ ID NO: 3201 - DNA, 94 bp, homo sapiens
gatgctctggggtttttggcatttggtgtggggaacgtcactggctttggtactgttgaccacccctgggatgctctgggatttttggcatttg

SEQ ID NO: 3202 - DNA, 160 bp, homo sapiens
attacaaagtgaattcattctgttgttttctttttcaatgattacttattctgtcatctgttaatactgatcataaattgtgtcacttccaggaaagtttctctaattacaaagtgaattcattctgttgttttcttttcaatgattacttattctgtct

SEQ ID NO: 3203 - DNA, 84 bp, homo sapiens
agcagagagggtagctcctctctgcaggcaggtcatcctaccaagtatttagcttccagcagagagggtagcttctctctgcag

SEQ ID NO: 3204 - DNA, 97 bp, homo sapiens
tggatatagaaaatgtggtatatgtgtgaatatatatatgtatatacatatgtatgtgtgtatatatggatgaatggataaagaaaatgtggtatat

SEQ ID NO: 3205 - DNA, 84 bp, homo sapiens
gcaataaaaagtacatggtgtatgtgtaccatgtctttgctatggtgaatagtgctgagatgcaataacaagtacatggtgtat

SEQ ID NO: 3206 - DNA, 147 bp, homo sapiens
aaggtgagatttgggtgggcacaaagagccaaaccacagatagaaagagccaaaccatagataggcagcccttgacacatggggtttatgaggattacaattcaaggtgagatttgggtgggcacaaagagccaaaccatagataga

SEQ ID NO: 3207 - DNA, 93 bp, homo sapiens
tcttcctttagagttagtttagtctagtgtgggtctagactagtctttttacagtgggtctagagtagtctttcctttagagttagtttagtc

SEQ ID NO: 3208 - DNA, 126 bp, homo sapiens
tcttatgaatttctataagtttcttatagatgctgaatattagacctttgtcagatgcaaactttgcccaatttttaatggggttgtttttctcttatgaatttctgtaagtttcttatagatgct

SEQ ID NO: 3209 - DNA, 126 bp, homo sapiens; identical to SEQ ID NO: 3208

SEQ ID NO: 3210 - DNA, 101 bp, homo sapiens
actttcatccaaaattaattttaatttctttttgctggcattctgttgtgaaaaagaatattctctgccccaattatcactttcatccaaaattaatttta

SEQ ID NO: 3211 - DNA, 108 bp, homo sapiens
agctagatacagagtgtcgattggtgcattcacaaaccttgagctaaacacagggtgctgattggtgtgtttacaaaccttgagctagatacagagtgccgattggtg

SEQ ID NO: 3212 - DNA, 108 bp, homo sapiens
gcacatgtgcaggtttgttacataggtaaacttgtgtgatgggggtttgtttttttttattatttaagttttacggtacatgtgcacaatgtgcaggtttgttacata

SEQ ID NO: 3213 - DNA, 123 bp, homo sapiens
aaatgtccatgaaatcttcacaatttatgttcagagactgcagtaaagacaggcataagaaattataaaagtattaatttagggaattaataaatgtccatgaaatcttcacaatttatgttc

SEQ ID NO: 3214 - DNA, 99 bp, homo sapiens
tctaatgaccagtaatgataagctttttttcatatgtcattgtggtttctgatttgcatttttctaatgaccagtaatgatgagctttttttcatatgt

SEQ ID NO: 3215 - DNA, 106 bp, homo sapiens
tcattattttgggaataatgcttgtctttacatggattatgtctatcaatctgtagaaggaattgcataattcattattttaggaataatgcttgtctttacatgg

SEQ ID NO: 3216 - DNA, 101 bp, homo sapiens
gaggcttactcactcatctctagtgcctggactgaaacttgaacagctgggggctgatctcgaattatccagaggcttactcactcatgtctagtgcctgg

SEQ ID NO: 3217 - DNA, 78 bp, homo sapiens
aaaatcaaagcttttaaaattctaaatttttttttaattttgatttttttaaaaaatcaaagcttttaaaatcctaaa

SEQ ID NO: 3218 - DNA, 74 bp, homo sapiens
ctctcatccttctaggaaactagtagaacacacacacactctttctcctgtctctcatccttctagaaaactag

SEQ ID NO: 3219 - DNA, 97 bp, homo sapiens
ttctcttactatatggatcaaacttttccattctgtatcactcctgttaaaaccttacaatatttgttctcttactgtatggatcaaacttttccat

SEQ ID NO: 3220 - DNA, 104 bp, homo sapiens
tgtctttggaggctgagtcagtttctgggcaatgggtatcgatgattggttaggatgaaatcatatgagtatgcaaattgtctttgcaggctgagtcagtttct

SEQ ID NO: 3221 - DNA, 96 bp, homo sapiens
cacaattttaaaattgtatctgtaactgttattacagatacaaattattataataattaaaaagtcacattcacaatttttaaattgtatctgtaa

SEQ ID NO: 3222 - DNA, 99 bp, homo sapiens
ttataatatcaaagcagaaaaaagctattctgttggaaaacaaatgcagatattagtgataaatatttttaaatgttataatatcaaagcagaaaaaag

SEQ ID NO: 3223 - DNA, 113 bp, homo sapiens
aattcctaagatcccatcatttgtaagtgggagaagaaacttttcagatgtagaaaactgagactcaccaaaactttggcttaaattcctaagatcccatcatttgtaagtgg

SEQ ID NO: 3224 - DNA, 75 bp, homo sapiens
aaatatctgaaatattcagatatttcagataattcaatatttgaaatattcaatatttgaaatattcaaatatct

SEQ ID NO: 3225 - DNA, 88 bp, homo sapiens
ttaacagcacatgattaaatttgattaagagttttttaagtattttaaaatcatgtgattaacagcacatgattaaatatgattaaga

SEQ ID NO: 3226 - DNA, 90 bp, homo sapiens
tactttattctgttttattttagtctcttgggtttacatacatgtggttgttcttttccatactttattctgttttattttagtctcttg

SEQ ID NO: 3227 - DNA, 82 bp, homo sapiens
gtcatccctcaatatccatggggtatacatataattgtgtgtgtgtttgtgtgtatgcagttatccctcaatatccatgggg

SEQ ID NO: 3228 - DNA, 107 bp, homo sapiens
taagaaggaaaaccttgagtttgaatccagatagttacaagatccagagaagttaagcaacttgttcatgttaagaaggaaaaccttgaatttgaatccagatagtt

SEQ ID NO: 3229 - DNA, 94 bp, homo sapiens
aacacatcttttctgtttcttcatcattttttggctcttctggtacctgctcttctcagcaagaaccagaacacgtcttttctgtttcttcatc

SEQ ID NO: 3230 - DNA, 111 bp, homo sapiens
atatatatataataaaatatatagaaatacatagaaataaatataatagatataaacatacataaatgtatatttttaaaatacatagaaatacatataattatgtccaaa

SEQ ID NO: 3231 - DNA, 77 bp, homo sapiens
tctctctcctgctgccttgtgaaagaggaagtgtttgcttcaccttccattcttccctctcctgctgccttgtgaaa

SEQ ID NO: 3232 - DNA, 161 bp, homo sapiens
gtttcatgtttttcttctttatacatgctcctgtttcatgtttttctttatacatgctcgtttcatgtttttcttctttaccttgtgcctttcttgtttttcttctttaccttgtgcgtttcttcttgtttcatgtttttcttctttaccttgtgcctttc

SEQ ID NO: 3233 - DNA, 114 bp, homo sapiens
tggagaacctttatgtctagctcagggactgtaaatacaccaatctacactctgtatctagctactctggtggggccttggagaacctttatgtctagctcagggattgtaaat

SEQ ID NO: 3234 - DNA, 177 bp, homo sapiens
taaaatatcagagaaaaggtacagagaaggtacagggaagcccttacttgggcaaagcttgttcgttcaattcatgtacaaggtacagaaaaggtacagaggtacaaaggtacagaaggtacagaggtacagagatacaaaggtacgaaggtacaaaggtacagaaaaggtacagag

SEQ ID NO: 3235 - DNA, 162 bp, homo sapiens
tatatatatataaaacctcactttaacccctaactcaatgaagtattatatatgttatataatacttattatatatatatatataaactcacttaatacctctctctctctctctctctccctctctctctctatatatatatacactcacttaatacctct

SEQ ID NO: 3236 - DNA, 117 bp, homo sapiens
acacatgcatgtataatacatatgtagacatctagatttatgtgtgtatgtatctacagatataaatacagatgtctgtctgtatgtacacatgcatgtataatacatatatagaca

SEQ ID NO: 3237 - DNA, 101 bp, homo sapiens
taaaatagatttttaaatgtaatcaatgttttcagtttggaaatggatagatttaaggcagaggattaggcccgctaaaatagatttttaaatgtaatcaa

SEQ ID NO: 3238 - DNA, 85 bp, homo sapiens
atgtacacaggcagatgaaaataggcagtaataaatattcacaaatgtatattttaaataatgtatacaggcagatgaaaatagg

SEQ ID NO: 3239 - DNA, 98 bp, homo sapiens
ttttatttgattctaacaaaaatcctaatctttaggaccatatggtatacaagtcgtttttattataaatatttttatttgattctaacaaaaaccct

SEQ ID NO: 3240 - DNA, 139 bp, homo sapiens
gtggtcttggtttcttcttttgagggaggagtggagactggcatttggaggccatgctgctagggaagtccaagaacctccagtcccagagcaggaggtggtcttggtttcttcttttgaggcaggagtggagactggc

SEQ ID NO: 3241 - DNA, 146 bp, homo sapiens
atgcatagtttgcaaagattttctcccactttgtgggctgttttttcttcctagtttgtttaagtcagttccttgtagattctgtatattagtcctttgtcaaatgcatagtttgcaaagattttctcccactttgtgggctgttt

SEQ ID NO: 3242 - DNA, 158 bp, homo sapiens
tattctgaattctatttttttcatttcagccatctcagcctggttcagaaccaggagattaggtttcaacatatacctgtagctcaatgatctttgtgtctatacctattctgaattctattttttttcatttcagccatctcagcctggttcagaac

SEQ ID NO: 3243 - DNA, 116 bp, homo sapiens
tggcccttactgatgcattctcgaaaacctgcacccttgcctgtcctcctagaccacaaagaagaccgagaaaaatcggatttagtggcccttactgacgcattctcgaaaacctg

SEQ ID NO: 3244 - DNA, 195 bp, homo sapiens
ttgtaaatgcaccaatcagcactctgtatctagcttatctgctggggacttggagaacatttatgtctagctaagggattgtaaatacaccaatcagcactctgtatctagctcaaggtttgtgaacacaccaatcagcaccctgtgtctagctcaaggtttgtaaatgtaccaatcagtaatctgtgtctagct

SEQ ID NO: 3245 - DNA, 97 bp, homo sapiens
tccttcacccttagcggcaagtcccgcttttctgggggaggggcaagtacccctcaaccccttctccttcacctttagcggcaagtcccgcttttct

SEQ ID NO: 3246 - DNA, 75 bp, homo sapiens; identical to SEQ ID NO: 302

SEQ ID NO: 3247 - DNA, 107 bp, homo sapiens
attactctaactgccaagcatgtctatgccttcctaactataatagctcttaacttcaggacctaaaactcaatgtagagattactctaactgccaggcatgtctat

SEQ ID NO: 3248 - DNA, 163 bp, homo sapiens
tcagacttgaagtgggtagctcctttctgcaggcaggtcatctagatgagtttccagctctcagcaaagaggagacccagagtgagtagctcctatatgcattcaggtcattccatcatctgcacagccctctgtggagcggagacccagagtgggtagctcc

SEQ ID NO: 3249 - DNA, 94 bp, homo sapiens
tacacgtatcattagttaaggaacttacatcattagttaaggaattccttaacatccattagttaaagaataacttacatcattagttaaggaa

SEQ ID NO: 3250 - DNA, 79 bp, homo sapiens
gtacccctgcatttgtacccctgcatcccggaaacagttgaggccaaggtcatacccctgcatttgtacccctgcattt

SEQ ID NO: 3251 - DNA, 108 bp, homo sapiens
cttctattagaatgcttagtttgatgttcctgagcaccaaaagactataaagaagtcttttggaattaacttcttctattagaatgcttagtttgatgctcctgagca

SEQ ID NO: 3252 - DNA, 117 bp, homo sapiens
tatctctgcaccccgatcccttatttccacgccccaacctcttatatctctgcaccctgatcccttatttccatgccccaacctcttatatctctgcaccctgatcccttatttcca

SEQ ID NO: 3253 - DNA, 100 bp, homo sapiens
aaacagagaatactcaaataaaattcctagacaaaggaagaaaataagaaaatctctatataaagctaaattaggaaaacagagaatactcaaataaaat

SEQ ID NO: 3254 - DNA, 252 bp, homo sapiens
caccaatcagcactctgtgtctagctcaaggtttataaacgcaccaatcagcactctgtgtctagctcaaggtttgtaaatgcaccaatcagtgctctgtgtctagttaatctagtggggacttggagaatttttacatctagctagaagtttgtaaatacaccaatcagcactctgtggctagctcagggattgtaaacgcaccagtcagcaccctgtcaaaacgaaccaatcagctctctgtaaaatgga

SEQ ID NO: 3255 - DNA, 111 bp, homo sapiens
acacaaagcaaaagaaaatgactaaaatggaaataatccttctaaatttatatctgcatacactataaaataatcttacacaaagcaaaagaaaatgagtaaaatggaaat

SEQ ID NO: 3256 - DNA, 75 bp, homo sapiens
acacaaaggttctccatgtccccactagattagctagatacacagtgtccacacaaaggttctccaagtccccac

SEQ ID NO: 3257 - DNA, 312 bp, homo sapiens
caccaatcagcactctgtgtctagctcaaggtttgtaaatgcatcaatcagcaccctgtgtctagctcaaggtttgtaaatccaccaatcagtactctgtatctagctgatctggtggggacttggagaacctttatgtctagctaagagattgtgaatacactaatcagcactctgtatctagctaatctagtgggacttggagaacttttgtgtctaactcagggattgtaaacgcaccaatcagcaccctgtcaaaacggaccaatcagctctctgtaaaacagaccaatcagctctctgtaaaatgga

SEQ ID NO: 3258 - DNA, 137 bp, homo sapiens
aacagatgtatagtagtatctcactgttgtttcaatatgctatcccttaatggtcattgttttgaattttagacattctaatactaacagatgtatagtagtatttcactgttgtttcaatatgctatcccttaatg

SEQ ID NO: 3259 - DNA, 191 bp, homo sapiens
ctgattggtgcgtttacaaatctttagctagacacaaaagttctccaagtcccctacccgattagctagacacagagctctgattggtgcatttacaaacctttagctacacacagagtgctgattggtgcatttaccaacctttagctacacacagagtgctgattggtgcatttacaaacctttagcta

SEQ ID NO: 3260 - DNA, 102 bp, homo sapiens
cagtgtctcttccatatactattatgttaggtatttaaatcttcctgtagatcttttaagcttttactcacagtgtctcttccatatactattatgttaggt

SEQ ID NO: 3261 - DNA, 101 bp, homo sapiens
gtttcattctgatagaagaggatgggaactatctaattttcagtggccagatggggataaaccatagtaaactgtttcattctgatggaagaggatgggaa

SEQ ID NO: 3262 - DNA, 73 bp, homo sapiens
aaaattaatccattctcataacagtctgtaatgagcgcagaaaattgagcaaaattaatccgttctcataaca

SEQ ID NO: 3263 - DNA, 124 bp, homo sapiens
ttttcttctcattgtatgattgtgttgtattatggaacaaaatgttgtattatggaacattgtattaggattcctttttcttactttttcttctcattgtatgattgtgttgtattatggaaca

SEQ ID NO: 3264 - DNA, 116 bp, homo sapiens
ttatagttagtgaaaaaagtaagagtgcaccacatttttaaaaaaatcaaaagttatagttattatataattcaaaacttatagttagtgaaaaaagtaagagtgcacgacatttt

SEQ ID NO: 3265 - DNA, 116 bp, homo sapiens
atatatatatcctattagttctgagcctctaagagaggatatatatatatatatatatatatatatatatatatatacacatatatatatcccattagttctgagcctctaagaga

SEQ ID NO: 3266 - DNA, 96 bp, homo sapiens
cccactccagggcctcctctctgctgagagctatagagaggatgagatgaccttcctacagagaggagcttcccactccagggtctcctctctgct

SEQ ID NO: 3267 - DNA, 108 bp, homo sapiens
ttcaaggggattttattaagtattaactcatggtaatgtagtgagttccatccacaagggaacctggcctcccctttattcaaggggattttattaagtattgactca

SEQ ID NO: 3268 - DNA, 100 bp, homo sapiens
tattgttattccctctgaaaactcaagaattcacaatacaatacaaaacaatacaaaaatcctcttatatttttattccctctgaaaactcaagaattca

SEQ ID NO: 3269 - DNA, 122 bp, homo sapiens
tgattcagacaatagcctagtctgcttactcccaaggtaagcagatatgtaagaaggtttctcaggaatactcttgatagcaagtgcatgattcagacaatagcctagtctgcttactccca

SEQ ID NO: 3270 - DNA, 111 bp, homo sapiens
cattgtaatataaaacaatggaattaaacatgtaaatattgtcagctcatgccttctcaaatagttttatcattgtaatataaaacaatggaattaaacatataaatattg

SEQ ID NO: 3271 - DNA, 221 bp, homo sapiens
agatggggccgagtaggaatggagggcctaatggaaggtgtttagtcatgaggtgtttagttcatgagatggggccaagtaggaatggagggcctaatgaaaggtgtttagttcattttgaaccctccaaaattcatgttggaatttaattgataatgtaaaattactggaagatggggccaagtaggaatggagggcctaatggaaggtgtttagttcat

SEQ ID NO: 3272 - DNA, 74 bp, homo sapiens
tgtatctagctactctggtggggacttggagaacctttgtgtccacaccgtgtatctagctaatctggtgggga

SEQ ID NO: 3273 - DNA, 115 bp, homo sapiens
gaatcaccaacaccaaggttttataagttgtatttgtcattaaacaaacaaacaaaacaaaaaaacacaacacaatgtaaagatgaatcaccaagcaccaaggttttataagttg

SEQ ID NO: 3274 - DNA, 93 bp, homo sapiens
agtgcttacttagaacaaattaagtgcttacttagaacaaattaacatgccaaaatcaacactaataaagagtgcttacttagaacaaattaa

SEQ ID NO: 3275 - DNA, 148 bp, homo sapiens
agaaaatgtgaaaacattacaatatttcagagaaaggaaccatggttcagtttctttgtacagttttaaaatgtgaaaatattaaaatactgcctattttaattttttatattttatctatcttattaaatgtgaaaatattaaaata

SEQ ID NO: 3276 - DNA, 137 bp, homo sapiens
atctggtacaaagatgttcaaagacttaaaagaaaatatagtcataatgagtgaagatatgggaaaactcacaagatagatggaatgaagaagacatctagtacaaagatgttcaaagacttaaaagaaaatatagt

SEQ ID NO: 3277 - DNA, 181 bp, homo sapiens
tgtaaatataccaatcagcactctgtatctagctactctggtggggccttggagaacctttatgtctagctcaggaattgtaaatacaccaatcagcactctgtctctagctcaaggtttgtaaacacaccaatcagcaccctgtgtctagctcagggtgctagacaaatcaacactctgt

SEQ ID NO: 3278 - DNA, 122 bp, homo sapiens
aattcctcaatcccagaccgtaaaaacctagagaggtcacagtctcccttctcccttgaagatcctcattccagagaagtcctgccccataattcctcaatcccagacagtaaaaacctaga

SEQ ID NO: 3279 - DNA, 109 bp, homo sapiens
gggcttacaatattcagcaaaccatgctttaaacagatgtggtatcatgtgggcttgaaaacagtgggctttgtaaacagtgggcttacaatattcagtaaaccatgct

SEQ ID NO: 3280 - DNA, 130 bp, homo sapiens
aatatattgttgctgctattttgaacaaatgcttatgtgttagatcgactgagagtgagaaaaacacataagcatacataatcaaatatattgttgctgctattttgaacagatgcttatgtgttagatc

SEQ ID NO: 3281 - DNA, 92 bp, homo sapiens
tgatcagttggctctcattttctctaagtcatccctttgccttaaactgagcatctatctgatcagctggctctcattttctctaagtcatc

SEQ ID NO: 3282 - DNA, 95 bp, homo sapiens
atatatgtatatttaattcacccttttttctgtaaaagagaacttatatatgtatatttaataacatatatgtatatttaatccacccttttttc

SEQ ID NO: 3283 - DNA, 102 bp, homo sapiens
ttttatttattcattcaccaaatagttaaatgactagtcttctgcagaaaggaactctaaaaaagaaatcaattatcttttatttattcattcaccagatag

SEQ ID NO: 3284 - DNA, 105 bp, homo sapiens
aaaaatgtattgacataaaaatgtattgacataaaaagtttatttccattattttctaacagagatataaaataagcagtaaaaaatgtattgacataaaaagtt

SEQ ID NO: 3285 - DNA, 86 bp, homo sapiens
tatgctggacatgctcacaggcacgtagtacattctatgtccttgtactttaaccaagatatctatgctagacatgctcacaggca

SEQ ID NO: 3286 - DNA, 179 bp, homo sapiens
agacagacagacagaaagattagagacagaaagacagacagacagatagatagatagatagataaagatagatacataggtacgtagataggtaggtagataaataaagttgctgagttaacttagatagatagatagatagatagatagatagatagatagatagatagataatagat

SEQ ID NO: 3287 - DNA, 80 bp, homo sapiens
ttcctgtcttcttctgagccctccaagtccctaggaagttccaaactttcccacattttccagtcttcttctgagccctc

SEQ ID NO: 3288 - DNA, 101 bp, homo sapiens
ttaacccaccaactctgaatatcagaatttataaatgtataaaatttccacagaaaatgtctcaagtttcatgaatgttaacccaccagctctgaatatca

SEQ ID NO: 3289 - DNA, 112 bp, homo sapiens
tatatatatatatatatatatatatatatgcagattcaacagctctttcatttggagtatgtgtcacattacagtaactatattatatatatatctatatgcagattcaaca

SEQ ID NO: 3290 - DNA, 105 bp, homo sapiens
aatttgtaaaagtaactatcaggccaagcatggtggctcatgcctgtaaccccagctacagattcaataggaatccaacaatttgtaaaagtaattatcaggcca

SEQ ID NO: 3291 - DNA, 113 bp, homo sapiens
tgagatggataaacaggactataagatccgaagactctgagtcttcgtaatagagtttaaatgcaaacatcacttgagatggataaacaggactataagatcccaagactctg

SEQ ID NO: 3292 - DNA, 91 bp, homo sapiens
ggctcagctgatgccccattcctggtcatcctcaacttggcagacccttcttcatgcccatcactcggctcagctgatgccccattcctgg

SEQ ID NO: 3293 - DNA, 158 bp, homo sapiens
caccaatcggcactctgtatctagctcaaggtttgtaaacacaccaatcagcaccctgtgtctagctcagggtttgtgaatgcaccaatcgacactctgtatctagctactctggtggggccttgaagaacctttgtgtccacactctgtatctagct

SEQ ID NO: 3294 - DNA, 133 bp, homo sapiens
aaaaacccagaaaaataaatttactgtaggcatagtgaccatgccttgaaagcaaaaagcaagactctgtctcaaaaaaaaaaaaaaaaagaaaaacccagaaaaataaatttactataggcatagtgaccat

SEQ ID NO: 3295 - DNA, 99 bp, homo sapiens
ggcatttggaagagagacaggtaggcagttagatgaattacattcttatgtaatttggaagagattacggcatttggaagagagacaggtaggcagtta

SEQ ID NO: 3296 - DNA, 105 bp, homo sapiens
actcagcctgcaatcagtctgattggttgtggacagcaaccattcagaggctggagtgaagttacaaagttgcaaacgaatactcaacctgcaatcagtctgatt

SEQ ID NO: 3297 - DNA, 124 bp, homo sapiens
tgaatgagaggggattacatatatatatatatatatatatatatgaatgagaagggaatttatatatataatttgaatgaggggggattacatatatgtatgaatgagagaggatttattaaaa

SEQ ID NO: 3298 - DNA, 151 bp, homo sapiens
tggattaacaatagatatcaccatttatttcttcagacaacaccagtaagttttttacaagccaaattctcattgcatgctgtcctatgtggtgtacttatgtggattaacaatagatatcaccatttatttcttcagacaacatcagtaa

SEQ ID NO: 3299 - DNA, 103 bp, homo sapiens
tctgatcagcagggtccagggactgttgtgggttcttgggaaggggttgtttctgctgctgcatcagtgagcacaactattctgaacagcagggtccagggac

SEQ ID NO: 3300 - DNA, 122 bp, homo sapiens
ggaaaaatatttttcttctcaaatattatcaggtggagaacacttaaaaccaaaccaaatagcactaaactgcttcccagaggtttttgtggaaaaatatttttcttctcaaatattatcag

SEQ ID NO: 3301 - DNA, 96 bp, homo sapiens
tgactcattttggctgaggggaaagtcgcctttgattggttgaactttcaatcccttagcttgcagctatgactcattttggcttaggggaaagtc

SEQ ID NO: 3302 - DNA, 115 bp, homo sapiens
atttggatacatgctacaacatggataaatttggatacatacatttggatacatgctacaacatgtatgatacatgctacatgtatggataaatttcgatacatgctacaacatg

SEQ ID NO: 3303 - DNA, 78 bp, homo sapiens
ttaagtattttcaagtagatccattacatctacctttgctttgcttagcttagcttaagtattttcaagtaaatccat

SEQ ID NO: 3304 - DNA, 82 bp, homo sapiens
ctggtcacctgctccatcctgactcttccccaacaccagctttgacctgagtcacctctggtcacctgctccatcctgactc

SEQ ID NO: 3305 - DNA, 83 bp, homo sapiens
tgttttatatagaatataggacaaattaagcagttaagcagtttttgtctttacatgttttatatacaatataggacaaatta

SEQ ID NO: 3306 - DNA, 148 bp, homo sapiens
gagctgtaacactcaccgcgaagatctgcagcttcactcctgagcccagcaagaccatgagcccaccgggaggaacgaacaactccagacgcactgccttaagagctgtaacactcaccgcgaaggtctgcagcttcactcctgagcc

SEQ ID NO: 3307 - DNA, 115 bp, homo sapiens
tgtaagacattctttttaaaaacatttaatacttgggtgatgaataccttaaaattggatctaacaccataattatattttattaactgtaagacattctttttaaaaacattta

SEQ ID NO: 3308 - DNA, 80 bp, homo sapiens
gaggtcttaaccttcgctatcttaactagatctatcttaagaacaaattcttatgttgaggtcttaaccttcactatctt

SEQ ID NO: 3309 - DNA, 134 bp, homo sapiens
tcactataatctaccttagagttcagtttgcctaaattgttatcctttttacacaaaaacatttggccccacaatcacgattcctgatacctactcactataatctaccttagagttcagtttgcccaaattgt

SEQ ID NO: 3310 - DNA, 103 bp, homo sapiens
tgttgactttataacacattataacccagatttctttagttgaaattgttaaattcctttccttaacaataatttctctgttgactttataacacattgtaac

SEQ ID NO: 3311 - DNA, 92 bp, homo sapiens
aaaattcaaattaggaattaatgatactaaaattaggaattaatgatattaaaattaatgatattaaaaaattcaaattaggaattaatatt

SEQ ID NO: 3312 - DNA, 104 bp, homo sapiens
caatggtccctggaccctgctgatcagaatagttgtgctcaccgacacagcagcagaaacacctcttgcccaagaactcacaatggtccctggatcctgctgat

SEQ ID NO: 3313 - DNA, 121 bp, homo sapiens
gtaatttcctttctttgggggaatgtaggggtgaggaaaagggagaaagagagagaggcaggagatagctctgtgtctctcacaatgtaatttcctttctttgggggaatgtgggggtgag

SEQ ID NO: 3314 - DNA, 79 bp, homo sapiens
ccttcccaggcactggcgctaccgctggaccaaggtcctctaggcaactggcaccttcccaggcactggcgttaccgct

SEQ ID NO: 3315 - DNA, 94 bp, homo sapiens
tgaaatgaagttacaaagttacactttatgtaaatgtctgattggttgcctgagggaaccaatcagagaatgaagtgaagttacaaagttacac

SEQ ID NO: 3316 - DNA, 89 bp, homo sapiens
gatgtctgcttcactctgatcatgtgttgggcaacaaggaataaaagaatgacaatatgaaagtgatgtctgcttcactctgatcatgt

SEQ ID NO: 3317 - DNA, 81 bp, homo sapiens
tgtacaccaagtaaataactttgtaacctcacttcatcctcttcatttgcatagagtgtacaccaagtaaatagctttgta

SEQ ID NO: 3318 - DNA, 81 bp, homo sapiens
ttttacgtaagatgacatagacaaatggggcagaggaaaaatgcagggaatctgtattttacgtaagatgatatagacaaa

SEQ ID NO: 3319 - DNA, 76 bp, homo sapiens
agggatggttcaatccaaagtgttgaaatctgtagggatggttctatagggacggttcaatccaaagtgttgaatc

SEQ ID NO: 3320 - DNA, 94 bp, homo sapiens
agtaaattaaaaatagcatatcaacgttattttttcttttttcccctaagtgttctacccagtactaaagcagtaaattaaaaatagaatatca

SEQ ID NO: 3321 - DNA, 98 bp, homo sapiens
agaagttgttttgagagcaaatataatatctcgctgttttctttttcttctattgcttccttgttttggaaatttagaagttattttgagagcaaata

SEQ ID NO: 3322 - DNA, 83 bp, homo sapiens
tttcccaatcatagcatactttatttgcctttgcaatttcatcaaatttagacttatctttcccaatcatagcatactttatt

SEQ ID NO: 3323 - DNA, 189 bp, homo sapiens
aagtccccacagagcactgattggtgtatttacagaccttgagctaggcacaggatgctgattggtgtgtttacaaaccttgagctagacacagagtgctgattggtgcatccacaatcccttagctagacataaaggttctccaagtccccaccagataagctagatacagagtgctgattggtgcat

SEQ ID NO: 3324 - DNA, 104 bp, homo sapiens
gtgggttgtctgtttattctgttgattcttcctttattctgttgactcttcctttattctattgactctgtgggttgtctgtttattctgttgactcttccttt

SEQ ID NO: 3325 - DNA, 91 bp, homo sapiens
tcagctatttcataggggtacttcaagaatcaaatgaaatggactctatgaaaatgcttcctcagctattttataggggtacttcaagaat

SEQ ID NO: 3326 - DNA, 87 bp, homo sapiens
ggggggtgcttgccccccaggaaagtggaaaaggggtagagacatggagagaaggggtcggggggtgcttgccccccagaaaagtgg

SEQ ID NO: 3327 - DNA, 107 bp, homo sapiens
tccaagtccccactagattagctagacacagcactgattggcgcatttacaatcccttagctagacacaaaagttatccaagtccccactacattagctagacacag

SEQ ID NO: 3328 - DNA, 105 bp, homo sapiens
ttcagctcacttttggctaacatatttagaccaaaatccaaacttttaatttataatatccatttttttttggttcagctcacttttggctaacatgtttagacc

SEQ ID NO: 3329 - DNA, 96 bp, homo sapiens
ttagttacttccaagataaaatgggggtacaggatttgcctatgagactctaaatcagaaacgagttagttacttccaagataaaatgggggtaca

SEQ ID NO: 3330 - DNA, 75 bp, homo sapiens
tcatgctgttctcatgatagtgaggtaattgaatcatggggtcagttatcttcatgctgttctcatgatagtgag

SEQ ID NO: 3331 - DNA, 145 bp, homo sapiens
ggttcaggatgtttctgtgtggaggagcattttattgtattgtggggttggaatgtctctggttggaggggaggttatctcggggctgccatgactttggttggaggggtatttatcgcagggttggaatgtttctggttggagg

SEQ ID NO: 3332 - DNA, 143 bp, homo sapiens
taatacttttataatttcttatgcctgtctttacttcaatctctgaacataaattgtgaagatttcattttaatatggacatttatcagttcccaaaattaatacttttataatttcttatgcctgtctttactttaatctct

SEQ ID NO: 3333 - DNA, 99 bp, homo sapiens
aaaacatcatcaaataaaaaattacatatagtataaataaatatttgttgaatcttaaaatttaaaaacctttttaaaacatcaacaaataaaaaatta

SEQ ID NO: 3334 - DNA, 107 bp, homo sapiens
cttgtacatggatatccacagcagtattatttataatgctgaaataaaacctgtccaaataacaataacacttgtacatggatatccacagcagtattatttataat

SEQ ID NO: 3335 - DNA, 117 bp, homo sapiens
attttacataggatgaaaaaagagaagttgtgtgtgtctgtgtgtgtgattttttttccttcctggaaaacacatgatacattttacataggatgaaaaaagagaagtgtgtgtgtg

SEQ ID NO: 3336 - DNA, 139 bp, homo sapiens
ttttctgtctagctaaaggattgtaaacgcaccaatcagtgctctgtgtctagctaaaggtttgtaaatgcactaatcagcactctgtaaaaacgcaccaatcagcactctgtgtctagctaaaggtttgtaaacgcac

SEQ ID NO: 3337 - DNA, 89 bp, homo sapiens
ccctgaaacttggaatggggatgtgttgttaaatgaaggcattgattggaaaagcatgggaccctgaaacttggaatggggatgtgttg

SEQ ID NO: 3338 - DNA, 87 bp, homo sapiens
gtgtcactcatctctgcttctctctaaagatggattccagtctaaagtaccatcaggaaacggtgtcactcacctctgcttctctct

SEQ ID NO: 3339 - DNA, 132 bp, homo sapiens
cagtttttatccaagtatttgtttgaaagaaatggtagacaaattgcagtttttatccaagtatttgtttgaaagatttcaaagatatgtttgaaaaattatcagtttttatccaagtatttgtttgaaaga

SEQ ID NO: 3340 - DNA, 84 bp, homo sapiens
gttgatataaccaagattagttagggagaggttaagagaccagtggttctaattgaattggttgatataaccaaggttagttag

SEQ ID NO: 3341 - DNA, 108 bp, homo sapiens
tggtactaagtattctagctatatttattctttatttttcattttgaaaaatgaaagctttataaaagcaatcctgtttcttctggtactaagtattatagctatatt

SEQ ID NO: 3342 - DNA, 147 bp, homo sapiens
gagtctataagatgatatgtttttccagttggcacctaatgtcaggacactcccttcagtttatggcagccttcaccacctcagtttctgtcttcgtgagtctataagatgatatgtttttccagttggaacctaatgtcaggacac

SEQ ID NO: 3343 - DNA, 111 bp, homo sapiens
aaaatttaaaatatggtattgtttctcctatgctgatgtaaattttcttaatataaattgttaaaataaattaataaaaatttaaagtatggtattgtttctcctatgctg

SEQ ID NO: 3344 - DNA, 80 bp, homo sapiens
gccatgaagggagaaacacaaacctgacccacccaaggcctagagaaacttgacgccacgaagggagaaacacaaacctg

SEQ ID NO: 3345 - DNA, 105 bp, homo sapiens
tgagtgcaactattccgatcagcagagtccagggaccattgtgggttcttgggcaagaggtgtttctgctgctgcgtcgttgagtgcaactattccaatcagcag

SEQ ID NO: 3346 - DNA, 97 bp, homo sapiens
gtgcatttacaatcctttagctagacacagagcactgattggtgcgtttttacagagtgctgattgtgcatttacaatcctttagctagacacagag

SEQ ID NO: 3347 - DNA, 112 bp, homo sapiens
gcatctgaccttagactctgtcaggctgaaggaccaggtccccaagttacaatgaacccccctgttaggaaggagcatctgaccttagactctgtcaggctgaaggaccagg

SEQ ID NO: 3348 - DNA, 84 bp, homo sapiens
ccaggctggagtgcagtggcatgattgttttattatttttaggtggtttcacttcatctcccaggctggagtgtagtggcatga

SEQ ID NO: 3349 - DNA, 198 bp, homo sapiens
ctgtaaacgcaccaatcagaactctatgtctagctaaaggtttgtaaacgcaccaatcagcactctgtgtctagctggaggtttgtaaatgcaccaatctgcactctgtgtctagctaatcaggtagggtacttggagaacttttgtgtctagctaaaggattgtaaatgcaccaatcagcactctgtgtctagctaa

SEQ ID NO: 3350 - DNA, 89 bp, homo sapiens
aatttaaggagataatggtcactattgagatgtcaagtcttccaaggttaagaatatcagggcaatttaaggagacaatggtcactatt

SEQ ID NO: 3351 - DNA, 108 bp, homo sapiens
gtagcggtgaggtccgggctatttttagattatttgtatacatttagggggtacaagtgcagctgtgttacatgaacatactgggtagcggtgaggtccgggctttta

SEQ ID NO: 3352 - DNA, 98 bp, homo sapiens
ccaacatggagaaacccccgtctcaaggcgaggtgggcgaatgacctgaggtcaggagttcgagaccagcctggccaacatggagaaacccccatctc

SEQ ID NO: 3353 - DNA, 121 bp, homo sapiens
ctactggccaaagatgggacagtttgagctccaataagaagaataattgccatgtattgaaactcattaaataatctgtgaggttttactactggccaaagatgggacagtttgggctcca

SEQ ID NO: 3354 - DNA, 88 bp, homo sapiens
aaaaaaagacaaacaaacaaacaaaaaaaacccaggcaacatagtgagaccctgtctctgtggggaaaaacaaacaaacaaacaaaca

SEQ ID NO: 3355 - DNA, 78 bp, homo sapiens
tgtatatagtgtattatgctgtttgtcatttttttcccccatgaacatgcacctgtatatagtgtattatgctgtttg

SEQ ID NO: 3356 - DNA, 105 bp, homo sapiens
gttggcccaagcaaaagaagaacccttcatatggaacttgtctaccagaaacaggttttgtggtgttgtgtgcttgtccgttggcccaagcaaaagcagaaccct

SEQ ID NO: 3357 - DNA, 101 bp, homo sapiens
tcagttattcagaacacctaacctcactgagaccagcagggttaaacaacctgattctatgtcagaacacccttctcagttattcagaacacctaacctca

SEQ ID NO: 3358 - DNA, 82 bp, homo sapiens
cttctcatctgcattctttgccattgaatactcagaattgatttattttcctctctttcttctcatctgaattctttgccat

SEQ ID NO: 3359 - DNA, 145 bp, homo sapiens
ctttttgcaaaatacctttttatctcattgaaaatgcagcttctatgtgaaattcatgaagccattgctgcagctctgccagcaggtgtgaaaatcttgcactttttgcaaaatgcctttttatctcattgaaaatgcagcttct

SEQ ID NO: 3360 - DNA, 117 bp, homo sapiens
acttagttattggagatgtattaagttggactggctcatattttaattctcattcttatgcttgccagttgctcagtaacttagttattggagatgtattaagttggactggctcat

SEQ ID NO: 3361 - DNA, 90 bp, homo sapiens
ccagaagcacacacaaagcaaacaagtgacgtccgcagtctcttccatctgtctgtccatccacccagaagcacacacaaagcaaacaag

SEQ ID NO: 3362 - DNA, 106 bp, homo sapiens
gtgagtgcaactattctgatcagcagggtccaaggaccattgcgggttcttgggcaagaggtgtttctgctgctgtgtcagtgagtgcaactattccgatcagcag

SEQ ID NO: 3363 - DNA, 321 bp, homo sapiens
ccgggaaatggaggaggtggagggattccaggaccaccaggaagagggggaggaggaggtggcattcctgcttctccaggcaagggaggaggtggggggggaattccagcactcccaggcaaaggaggtggtggtggggggattctagcactcccaggcaaaggaggaggtggggggatggcagtacctccaggcaaagaagagggtgaagggatgccaacaccctcaggcaaaggagggggtggagggatggtagcatccccagacaaaggagggggtggagagatagcagtacctccaggtaaagaagggggtgaggag

SEQ ID NO: 3364 - DNA, 405 bp, homo sapiens
taaatacaccaatcagcactctgtatctagctcaaggtttgtaaacacgccaatcagcaccctgtgtctagctcagggtttatgaatgcaccaatcggcactctgtatctagttaatctggtggggacttggagaatctttatgtctagctaagggattgtgaatgcaccaatcggcactctgtatctagctcaaggtttgtaaatgcaccaatcagcactctgcgtctagctcagggtttgtatgtaaatacaccaatggacactcagtatctagctaatctagtggggggacatggagaacttttgtatctagctcagggattgtaaacccaccaatcagcaccctgtcaaaacagaccattcagctctctgcaaaacagaccaatcggctctctgtaaaatg

SEQ ID NO: 3365 - DNA, 97 bp, homo sapiens
tttgttgttcagtaaaccctttcaacaacccttattttgttgttcagtaaaccctgtttgttcagaataaccctttgttgttcagtaaaccctttta

SEQ ID NO: 3366 - DNA, 72 bp, homo sapiens
ccctttaatacactttctagttctttaaagggctccaaaatataagctgccctttaatacactttttagttc

SEQ ID NO: 3367 - DNA, 92 bp, homo sapiens
ttgaattcacacaattcttgctgacgttcacacaattcttgctgacacattcacacaattcttgtgacattcacacaattcttgctgacatt

SEQ ID NO: 3368 - DNA, 75 bp, homo sapiens
tggcatgatcttggctcactgcaagctccgcctcccaggctggagtgcaatggcatgatcttggctcactgcaag

SEQ ID NO: 3369 - DNA, 96 bp, homo sapiens
actctggagcccaggctgttgcttccctgtctggtgatgaatcctctatagtctggtaagtgtagtggccgactctggagcccaggctgttgcttc

SEQ ID NO: 3370 - DNA, 97 bp, homo sapiens
gagctgctgccaatgggatcttttaggtaactccctccctagcttccgtgtgtctgtgcagtgcccatgagctgctgccaatgggatctttcaggta

SEQ ID NO: 3371 - DNA, 113 bp, homo sapiens
cctgtgatcatggcagacactgctaattatgacattctccagcacatatatggtaaatatatgacatatgggcccccatgcctgcctgtgatcatggcagacactgccaatta

SEQ ID NO: 3372 - DNA, 101 bp, homo sapiens
gagcccaatttaatgagaggtttgaggttcccatttagaattattgtttgaattctctactttgcaaaacagagcccaatttaatgagaggtttgaggttc

SEQ ID NO: 3373 - DNA, 75 bp, homo sapiens
aatgtcatcagttaaggcaggaacaggccattttcacttcttttgtagtggaatgtcatcagttaaggcaggaac

SEQ ID NO: 3374 - DNA, 103 bp, homo sapiens
tcttaatgctattatgatcctaaatactttaagcatgaaaattgacgatgtttttgatttcttaccaaatataaatctctcttaatgctatgatgatcctaaa

SEQ ID NO: 3375 - DNA, 73 bp, homo sapiens
atatttattaggaagaaataaaaacatatctcaatctactcctctcctgcatatttattagggagaaataaaa

SEQ ID NO: 3376 - DNA, 109 bp, homo sapiens
caactcttctgatcaccagggtccagggaccattgcgggttctcgggcaagagatgtttctgctgctgcattggtaagcacaactcttctgatcagcagggtccaggga

SEQ ID NO: 3377 - DNA, 116 bp, homo sapiens
gaatatttcttttggagtatttaaatcatctctgcaataatcctttgatcctgaaaaaaaatttgtggcatgagggaagagaagaatatttcttttggagtgtttaaatcatctct

SEQ ID NO: 3378 - DNA, 140 bp, homo sapiens
gaagctaaattgtgtgagaaagacaagtacttcagagaagatagtgtggagtcgcaaaataagtttcatgagagctcatacagaaaacagcctaaaactagaagctaaattgtgtaagaaagacaagtacttcagagaag

SEQ ID NO: 3379 - DNA, 83 bp, homo sapiens
cagggatcaaaagaatacttacttagaaaaaaaatcttacttacaaaagaaatcttacagggatcaaaagaatacttaattag

SEQ ID NO: 3380 - DNA, 135 bp, homo sapiens
cattagtcattattttatagggtgactgtaagattaaatgacataaagcacgaaagtatcagcatactgattgtcttagaatatatatgttcattagtcattatttcatagggtgactgtaagattaaatgacat

SEQ ID NO: 3381 - DNA, 89 bp, homo sapiens
ataagtgggagttgaacaatgagaacacaggaacagaaaaccaaacatcacacgttctcactcataagtgggagctgaacaatgagaac

SEQ ID NO: 3382 - DNA, 101 bp, homo sapiens
tctgctaatttttgactttttaacgatagccattctgattggtgtaagatttccctttactctgcatcctcatcaacatctactaatttttgactttttaa

SEQ ID NO: 3383 - DNA, 96 bp, homo sapiens
tagtgagtgagtatatatatttgcgattcctgcacataaccttttaaaaaatgtgctattttttgtgggtacgtagtgagtgagtatatatattta

SEQ ID NO: 3384 - DNA, 135 bp, homo sapiens
atttaattaccagagactaaaatcaagacattatgctttttgtcaaaaccaagaatcacttgtatcttcactagcccaaaggcaccatcatccgatttaattaccagagactaaaatcaagccattatgcttttt

SEQ ID NO: 3385 - DNA, 101 bp, homo sapiens
gttgcttgtttaattctcccaattttataagtttataattttataactaaagtttataagtttataattaaacagttgcttgtttaattctcccaatttta

SEQ ID NO: 3386 - DNA, 80 bp, homo sapiens
tttagttataagaatatttagaaatagatatatatatatttagttataagaatatttagaaatagaaatatatatatatt

SEQ ID NO: 3387 - DNA, 168 bp, homo sapiens
agaagtagaaagagacaaagacacagagacagagaggaggtgcccagagagacagcaccagaggcactaagagacagaagcaaggacaaagacagagacagaagcaaggacaaagacagagacagaagcaaggacaaagacagagacagaagcaaggacaaagacaga

SEQ ID NO: 3388 - DNA, 84 bp, homo sapiens
aggaagaaaaatgagatcagttggtaaaagttaaagacaatttttcttcctcttccacaaggaagaaaaatgagatcagtaggt

SEQ ID NO: 3389 - DNA, 100 bp, homo sapiens
atgagattgatctatctatctatctatctatctatctatctatctatctatctatctatctatcttaccaaactggaaagtttgatatctatctatctat

SEQ ID NO: 3390 - DNA, 108 bp, homo sapiens
ccagagccaaggtcctagcttgccatctgaggctgagcgcctggatacctgtctcacagtccaatggcaaattgagagtccagagccaaggtcctagcttgccatctg

SEQ ID NO: 3391 - DNA, 151 bp, homo sapiens
gcccaccgggaggaacgaacaactccagacgcgctgccttaagagctgttaacactcacagcgaaggtctgcagcttcactcctgagccagcgagaccacgggcccaccgggaggaaggaacaactccagacgcgctgccttaagagctgt

SEQ ID NO: 3392 - DNA, 95 bp, homo sapiens
gatcattgactaaagacatcctacaccaataacctgccataatcaatcacaaagtgtgccaaaactggatggatcattgactagagacatcctac

SEQ ID NO: 3393 - DNA, 84 bp, homo sapiens
aggcatgtgggtacataggaacctctcatgttgtgtgtgatgtatagaatagatggctgagaggcatgtgggtacacaggaacc

SEQ ID NO: 3394 - DNA, 109 bp, homo sapiens
tgaggaatctggtacaaagaggttaaagtaactttcccaggaccgtctagctggtcctttgtaccagatgaggaatctggtacaaagagattaaagtaactttcccagg

SEQ ID NO: 3395 - DNA, 103 bp, homo sapiens
ctcccaagtagctgggactacaggcatgcaccacagtaactcccaagtagctgggactacaggcatgtaccacagtagctcccaagtagctgggactacaggc

SEQ ID NO: 3396 - DNA, 128 bp, homo sapiens
agtccaggactgtgtttattttttggttaattcaacaaacatttattgaatatttcttgttctactctgtgtcctacatagtccaggactgtgtttattttttggttaattcaacaaatatttattga

SEQ ID NO: 3397 - DNA, 83 bp, homo sapiens
aaaactccctacacatacatataaatacagttgtgtatttgatccttccctaagaaaaatccctacacatacatataaataca

SEQ ID NO: 3398 - DNA, 128 bp, homo sapiens
cttaagttaataatttttactttgattacatgttgaaattatatttttatatattgggctaaataaaatatattttaattactacaacaaaaggcttaaattaataatttttactttgattacatgtt

SEQ ID NO: 3399 - DNA, 118 bp, homo sapiens
taaataaatatatatagtacttatttatatggtgtgtgtgtgtgtccgtgcgtgtgcatgcatgtaagaaatttatataaataaatataaatagtacttatttatatggtgtgtgtgt

SEQ ID NO: 3400 - DNA, 95 bp, homo sapiens
accaagtaaataactttgtaactctacttctgctatgacaggaaacatcctcttcatttgcataggatgtacaccaagtaaataacttcgtaact

SEQ ID NO: 3401 - DNA, 97 bp, homo sapiens
atctttattcacaaagaataaagatctctatttctatctggtatcttttttttttattatttctgtctggtatctttattcacaaagaataaagatc

SEQ ID NO: 3402 - DNA, 112 bp, homo sapiens
gtcacccaggctggagtgcaatggtgtgatctcggctcactgcaacctccgcctcccaggttcaagcaattctcactctgtcacccaggctggagtgcaatggtgtaatctc

SEQ ID NO: 3403 - DNA, 126 bp, homo sapiens
agcaggctgagaaggaggggttggtcttgctctctcgagtggcaaaggggaatcatcataaaggtcctcatcctcatggtcttcacattgagcaggctgagaaggaggggttggtcttgctgtctc

SEQ ID NO: 3404 - DNA, 76 bp, homo sapiens
gtacagattatgcttaaatgcttatcttaggaaaaataggaacccatcttttagtacagattatgcttaaatgctt

SEQ ID NO: 3405 - DNA, 81 bp, homo sapiens
ggtctgcagccatgacttgggtgcctgctcccagccccaaagagcacagagaggcccgggtctgcaggcatgacttgggtg

SEQ ID NO: 3406 - DNA, 153 bp, homo sapiens
aaggctctatcactttgatcttctatttagagatgaacagtcaaaggattataggcgtgagccaccaagtctgcctatcttgtttatttcttatagtgaccttatgaaggctctatcactttgatcttctatttagagatgaacagtcaaagg

SEQ ID NO: 3407 - DNA, 80 bp, homo sapiens
atctcagctcaccgcaacctccgcttcccaggttcaggctggagtgcagtcgtgtgatctcagctcaccgcaacctctgc

SEQ ID NO: 3408 - DNA, 95 bp, homo sapiens
aggttcccacagttagaggtactagtgcacagactagcactagtattggtattactgttatctcagtgggaggttcccacagttagaggtacagg

SEQ ID NO: 3409 - DNA, 108 bp, homo sapiens
tatttttagaacattctattaaaaaaatcagaagtatgaagatttatacaaaaatctttaaaaagtttatatcctttgacttatttttagaacattctattaagaaaa

SEQ ID NO: 3410 - DNA, 110 bp, homo sapiens
taatattgttaaaatgaggacttattaaacaattaaatgttaatattgttaaaatgagcacttgttatgtgccaattaaaatattaatattgttaaaatgagcacttatt

SEQ ID NO: 3411 - DNA, 79 bp, homo sapiens
aagtccgttcagttcagccttagcaaccttcctttcccctgaacccaaccagtccatagtccgttcagttcagccttag

SEQ ID NO: 3412 - DNA, 96 bp, homo sapiens
agaagtagaggctcagagtaaaagacccggtaatctagggggtggagggtacaaaacacttgatccagcaagaagtagaggctcagggtaaaagac

SEQ ID NO: 3413 - DNA, 84 bp, homo sapiens
ttacatgaagctattacacttacttttggaaacctacttgtttacctgaacttcggcttacatgaagctattacacttcctttt

SEQ ID NO: 3414 - DNA, 488 bp, homo sapiens
aatgcttcaccacatttcttacatgcatagagtttttcaccagtgtgtctttatatgttcttgcaagttagcaagacaatgaaatgcttccccacatttcttacattcacatggcgtctctccagtatgagttctttcatggtaatgaaggttactggaacagctgaaggttttactaaatttcttatattcatgaggtttctctccagtgtaagttttctactggagtgactaaagggttaccacattcctcacatttatacagtctcactccagtatgagttctttcattgtcttaaggggaactggaatatctgaaggctttaccacatttcttaaatttactgggattttctccagaatgaatgcttcagtctgaatgcttttccacacatttcttacattcatagggtttctttcctctgtgagttctttcatgtatgagaaaggaactggaaaaactaaaggctttaccacattgtttacat

SEQ ID NO: 3415 - DNA, 106 bp, homo sapiens
aaggctaactttgggtaagtgttggggtactgtaaaatctggtgaccacggaagcaactatagtgagaaaacccctgacccgaaggctaactttgggtaagtgttg

SEQ ID NO: 3416 - DNA, 93 bp, homo sapiens
acttaataaactcctctctctctctccatatatataatatctatatctatatatccatatatatatacacacttactaaactcctctctctct

SEQ ID NO: 3417 - DNA, 91 bp, homo sapiens
gcttatgctgataaggtggctagacaagcagctagctttccaacttctgtctctcacagcaaagcttatgctgataaggtgactagacaag

SEQ ID NO: 3418 - DNA, 132 bp, homo sapiens
aagcatgccaatgccaacaaagaagtctcctgcttcccagtccagctttaaatcccaagtccattcctgacaaggttttttggagaggctctatcaagcatgccgatgccaacaaagaagtctcctgcttcc

SEQ ID NO: 3419 - DNA, 99 bp, homo sapiens
atgtatatatagctaatatataagtagatttaaatgaattttgattcattccatatacatactatatagatgtaaatgtatatatagctaatatgtaag

SEQ ID NO: 3420 - DNA, 86 bp, homo sapiens
agaattattttcagggtattcagttgttagaataccctaacaactaaataccctaaaaatagagaattattttcaggttattcagt

SEQ ID NO: 3421 - DNA, 99 bp, homo sapiens
taattgcattgtcatgaaaataatgtttatgctaataaacatattatgcattattataataataatgcaataataatagttgcattgtcatgaaaataa

SEQ ID NO: 3422 - DNA, 72 bp, homo sapiens
ttccactagtatttaggcaggtaaatacagtaaccattttttgctagtattacactagtatttaggcaggta

SEQ ID NO: 3423 - DNA, 136 bp, homo sapiens
atatataggtttgtatatgtgtaaagtttagggcaaggggaatgatatataggggtatgatataaaggggaatgatatataggggaatgatatataggtttgtatatgtgtaaagtttagagcaaggggaatgata

SEQ ID NO: 3424 - DNA, 102 bp, homo sapiens
caggtgaaaatcatgtgaatatttatcacactgagtctcagttcaggtgaatattcacctctctgaatttcttttaccaggtgaaaatcaggtgaatattta

SEQ ID NO: 3425 - DNA, 111 bp, homo sapiens
tctggatattgcctttaaaaggagtggccgtgtgatagagttttttggcaattgggatgtgaaaaaaaaattaaatgtacaatgtctggatgttgcctttaaaaggagtgg

SEQ ID NO: 3426 - DNA, 255 bp, homo sapiens
atgcaccaatcagcactctgtgtctagctcaaggtttgtaaactcaccaatcagtgctcaggatctagctcaaggtttgtaaacacaccaatcagtgctctgtgtctagctaatctagtggggacttggagaacttttacatctagctagaggattgtaaatacaccaatcagcactctgggtctagctcaagatttgtaaacgcaccaatcagcaccctgtcaaaatggaccaatcagcactctgtaaaatggg

SEQ ID NO: 3427 - DNA, 82 bp, homo sapiens
agaagacaggaaaatgtgggaaagtttgcaacttcctagagatttggagggctcagaagacaggaagatgtgggaaagtttg

SEQ ID NO: 3428 - DNA, 122 bp, homo sapiens
attgtgaagatttcatggacacttattagtttcccaaattaatacttttataatttcttatgcctgtctttactgcaatctctaaacataaattgtgaagatttcatggacacttatcagtt

SEQ ID NO: 3429 - DNA, 106 bp, homo sapiens
atggcttttccacattttttacattcacaggcttttttccagttttattcctttcatgtctttgaaggaaactgtgaaaattaaatgctttccacattccttacct

SEQ ID NO: 3430 - DNA, 87 bp, homo sapiens
cttttaaaatatcagtcattacaaaggtaccaataaatcacaagccacgttaaacattttcttttaaaataccagtcattacaaagg

SEQ ID NO: 3431 - DNA, 80 bp, homo sapiens
aaagtttggaacttcctagagacttggagggctcagaagacagcaagatgtgggaaagtttggaaattcctagagacttg

SEQ ID NO: 3432 - DNA, 80 bp, homo sapiens
caagtctctaggaagttccaaactttcaaacatcttcctgtattctgagccctgcaagtctctaggaagttccaaacttt

SEQ ID NO: 3433 - DNA, 171 bp, homo sapiens
ttgactagacacagagtgctgattggtgcatttacaatcctttagctagacagaaaagttctccaggtgcccacccaattagctagacacagagcgctgattggtgcatttttacagagtgctgattggtgtgtttacaaacctttagctagacacagagcactgattggt

SEQ ID NO: 3434 - DNA, 111 bp, homo sapiens
tttttccatcagcaatagtccttgtatgtatgtgttgcagttgaaatgactgcataaaaattaaggccataccacatttctaaatttttccatcagcaatagtccttgtat

SEQ ID NO: 3435 - DNA, 99 bp, homo sapiens
tcctaatagtatccttttaattttatattatatattatatatattattatataatatatattatataataatatgtcctaatagtatgccttttaattt

SEQ ID NO: 3436 - DNA, 99 bp, homo sapiens
tgaggtatgatcacaatgccctgtattattagggcattatatattatatatgattaggtataatgaggtatgatcacaatgccctgtattattagggca

SEQ ID NO: 3437 - DNA, 130 bp, homo sapiens
aataaaagaagaaaaagaaaggataacaaagtaagaaccaaactgatgggccaaagatgtggccagaattggtctcaagaaacagagaaatgaataaaagaagaaaaagaaagggtaacaaagtaagaac

SEQ ID NO: 3438 - DNA, 147 bp, homo sapiens
aagataacaggattaagagattaaaataaagacaggcataagaaattataataacacaattatagtggtcctgaggtgacatacatcctcagcttacaaagataacaggattaagagattaaaataaagacaggcataagaaattat

SEQ ID NO: 3439 - DNA, 71 bp, homo sapiens
gtccccaccagattagctagatagagtgtggacacaaaggttctccacgtccccaccagagtagctagata

SEQ ID NO: 3440 - DNA, 140 bp, homo sapiens
agtatttattaattagttgctttattagtatttactgatttgatagtatttagttgcttacgtctctaaaatctattttctttttaaatcaagtctctattttccaggcaatactctatttgatagcatttagttgctta

SEQ ID NO: 3441 - DNA, 118 bp, homo sapiens
actagattacttaactagcaagttgcttagggttcaaatcccagttctgacacatactagattacttgggttcaaatcccagttctgacactagattacttaactagcaagttgctta

SEQ ID NO: 3442 - DNA, 73 bp, homo sapiens
gttaaaaacagtacaaattcctgggaccaggcgatcacttgagtgctgtgttaaaaacagtacaaattccagg

SEQ ID NO: 3443 - DNA, 104 bp, homo sapiens
gaaaccccatctcaaactttctcctcaacctgtgtttctcaaaagcaaactactcacccattcctgcaagaaaccccatctcaaactttctcgtcaacctgtgt

SEQ ID NO: 3444 - DNA, 96 bp, homo sapiens
catggtgcctgctgggtgagcatgagcatacataaatacatacagcataaatacctacagcatacatggtgcctgctgggtgagcatgagcataca

SEQ ID NO: 3445 - DNA, 105 bp, homo sapiens
tgtgttcaagctgaacattcccttgacccagtcactgatggagatatagacaggcaaaagccacgtcatctggctgtgttcaagctgaacagtcccttgacccag

SEQ ID NO: 3446 - DNA, 105 bp, homo sapiens; identical to SEQ ID NO: 3445

SEQ ID NO: 3447 - DNA, 105 bp, homo sapiens
aagaagaatcagccagtgcagaggcctatggcagacccaagcaggaggcaaaagaaacgcagaggctttccaggatggaaaatgaagaatcagccagtgcagagg

SEQ ID NO: 3448 - DNA, 82 bp, homo sapiens
tgttatttctttgcctcctgaaaatccagagaatttcactggaaatactttcatttttgttatttctttgcctcctgaaaat

SEQ ID NO: 3449 - DNA, 83 bp, homo sapiens
cagcattcacctgttgatagttgcatgcatgactatcaacacgtgtggcttttactcagcattcacctgttgatagttacatg

SEQ ID NO: 3450 - DNA, 108 bp, homo sapiens
tgtaattactgtaattttttcccctattgtagtttcttgcctgtatccataatttgaaggaaatggtaagagtgattagtgaaatgtaattactgtaattttttcccc

SEQ ID NO: 3451 - DNA, 89 bp, homo sapiens
agtgaacttgacaagcactcaggagatggatgtgcaaagatgcactaggtcagtgtccttagcagagtgaacttgacaagcactcagca

SEQ ID NO: 3452 - DNA, 110 bp, homo sapiens
ctatctcattccacaaaacaggcatttatgtagcactcattatatactgggagaatgtatcagctattgttcttaacgagactatctcattccaccaaacaggcatttat

SEQ ID NO: 3453 - DNA, 94 bp, homo sapiens
ctcaaaggataggacatgctcttgcggctgctgggaagagattttgctccaccagagacactcaaaggataggacatgctcttggggctgctgg

SEQ ID NO: 3454 - DNA, 68 bp, homo sapiens
gtgcatttacaattctttagctagacacagagtgctgattgtgtgtttttaaaatcctcttgcaagac

SEQ ID NO: 3455 - DNA, 98 bp, homo sapiens
gagtccccagcagggagatgtgatatctggggagactccccactcccagcccttccttcccggagtccccagcagggagatgtgatacctggggagac

SEQ ID NO: 3456 - DNA, 103 bp, homo sapiens
gatccaagtctaaacatgaaaatttttcagattttagaatattatttgcacatacataattagatatcttggcgatgagatccaagtctaaacatgaaatttc

SEQ ID NO: 3457 - DNA, 105 bp, homo sapiens
taaaatactctcatttacaaaaaggtttatgtatttattattattaatgtataataaatatatatttattattcgtaaaatactctcatttacaaagaggtttat

SEQ ID NO: 3458 - DNA, 73 bp, homo sapiens
ccatgcattcataatcaacagtcagctctgtttccctggcatgtccagcaccatgcattcataatcaacagtc

SEQ ID NO: 3459 - DNA, 75 bp, homo sapiens
atacttctggttatgggtcaaagaggtgttggactccactgagagagaagatacttctggttaagggtcaaagag

SEQ ID NO: 3460 - DNA, 82 bp, homo sapiens
ccagaaataaagccaaatacttacagccaactgatctggtataaaaataggcacataacccagaaataaagccaaatactta

SEQ ID NO: 3461 - DNA, 84 bp, homo sapiens
atgtgccaaggtcatatagagaccttgcctcaaaacaaaacaaaacaaaacagagtaatgcatgtgccaaggtcatatagagag

SEQ ID NO: 3462 - DNA, 111 bp, homo sapiens
agccataaaaaagaatgagatcatgtccatcaatgatagactggaaaaagaaaatgtggtacatatacaccatggaatactgtgtagccataaaaaagaatgagttcatgt

SEQ ID NO: 3463 - DNA, 80 bp, homo sapiens
gaaaatgtgggaaagttttgaacttcttagatacttagggggctcagaagacaggaaaatgtgggaaagtttggaacttc

SEQ ID NO: 3464 - DNA, 158 bp, homo sapiens
tggggtgctggtggggcaggggtgggggtaggtgtggggggcgagtcagagcagggtgctcctaggagtcgggtgctggtggggtggggcacagataggagcaggttgtaggtaggagctaggtgtgggtaatattggggtgctggtggggtggggca

SEQ ID NO: 3465 - DNA, 101 bp, homo sapiens
ggtggctcacacctgtaatcccaacactttgggaggccgaggcaggcagatcacaaggtcaggagttccgccgggcacggtggctcacgcctgtaatccca

SEQ ID NO: 3466 - DNA, 133 bp, homo sapiens
tcatgtccccacagcccctctcatgtccccatagcccctctcatgtccccacagcccctctcatgtccccacagctccctctcatgtccccacagctccctctcatgtccccacagcccctctcatgtcccca

SEQ ID NO: 3467 - DNA, 100 bp, homo sapiens
gtttgaccaaagctgcagtaggaaagtagttcacacacttctgcaatctcccgtatacattttacaagatgtttgaccaaagctgaagtaggaaagtagt

SEQ ID NO: 3468 - DNA, 123 bp, homo sapiens
cttcaggcatggctagatccaggtactcaaatcatatcttgatttgatttgagccaaatcatatcgtgaaatttgatttgaaatcatatcttcaggcatggctggatccaggtactcaaatca

SEQ ID NO: 3469 - DNA, 82 bp, homo sapiens
aagacttgaccaagggcacacaactggggcacacaactggggcacacaacttggtcaagacttgaccaagggcacacaactg

SEQ ID NO: 3470 - DNA, 87 bp, homo sapiens
ccacagatagcggtcctggacatggcacactttcagcaccgtggacagccccaggcgctccacagatagcggtcctggacgtggcac

SEQ ID NO: 3471 - DNA, 79 bp, homo sapiens
aaaaattcctaaacaattactcccaatttgactctgtctcaatttaaaaaaataaaaatcctaaacaattactcccaat

SEQ ID NO: 3472 - DNA, 114 bp, homo sapiens
aatgcggggctttaatgtaagtgggttctttcctctgtgtgtgtgtgtgtgtgtgtgcgcgtgtgtgtgtgtgtgtgtgtgtaatgcggggctttaatgtaagtgggttctttc

SEQ ID NO: 3473 - DNA, 106 bp, homo sapiens
cctgtaaccaatcctgttgtttctgtacctcactgctgatttctaagtgttcaaacaaggcaaacgccagcctgtaaccaatcctgttgtttctgtagctcactgc

SEQ ID NO: 3474 - DNA, 113 bp, homo sapiens
atgtcctgctgattggtctattttacagagtgctgattggtccatttttatagaatgctgattggtgcatttacaatcctctagctagacacagagtgctgattggtgcattt

SEQ ID NO: 3475 - DNA, 97 bp, homo sapiens
ctgacccctgcaccaacagcagcatgctgggcggagctgagcgcgctgacccctgcaccagcgctgacccctgcaccaacagcagcatgccgggcgg

SEQ ID NO: 3476 - DNA, 88 bp, homo sapiens
actgaacagtcccaggagtgggaagtgtcattgagtgggatttgagccactccgtcctcaccactggacagtcccaggagtgggaagt

SEQ ID NO: 3477 - DNA, 77 bp, homo sapiens
atgcccaacacacaccaatgcccaaacgcacaccaatgcccagcacacaccaatgcccaacgcacaccaatgcccaa

SEQ ID NO: 3478 - DNA, 73 bp, homo sapiens
ggggacaggtggtatcctgcttcagcacgaacgggaggagggggggcgggggggcaggtggtatcctgcttca

SEQ ID NO: 3479 - DNA, 95 bp, homo sapiens
gacttactctaagtacagtaacaggctttaccataacttactctaagtacagtaatgaacaggctttaccataacttactctaagtacagtaaca

SEQ ID NO: 3480 - DNA, 85 bp, homo sapiens
gccacaccgccgggtgtgtggcgtgcagcagacgtgtgctcctggccagggaaggggccagaccgccgggtgtgtggcgtgcagc

SEQ ID NO: 3481 - DNA, 96 bp, homo sapiens
tctgatcaaggctctggtgcaggaatgggaggcatcccgctgggggtcgggggaggcctaggtgccttgacttctgatcagggctctggtgcagga

SEQ ID NO: 3482 - DNA, 82 bp, homo sapiens
gaagactcaccttagagctttccatcccaagcagcccccaggccccaccttggcaggaagactcaccttagagctttccatc

SEQ ID NO: 3483 - DNA, 103 bp, homo sapiens
ctccacatgatttgcagacactctttagcctatcactggcacttcctagcttcttacattattgttgtctggcatctcctccacatgatttgcagacactctt

SEQ ID NO: 3484 - DNA, 95 bp, homo sapiens
ctgcactccgggctttggcatgagctccaggccaccagctggtgcggactcctgccttcaggtgggactgcactccgggctttggcatgagctcc

SEQ ID NO: 3485 - DNA, 104 bp, homo sapiens
ttttacctgctgagtagtgcttcacgtaatgttcatgcaactcatccccgttgttgtgtgtcttgatggctcctttctttttacctgctgagtagtgcttcacg

SEQ ID NO: 3486 - DNA, 121 bp, homo sapiens
tcataatattacaattttcagccttcagttactagaagaagaagatttgtcctcattagcggtagagattatctgatgtaaactcataatattacaattttcagccttcagttactagaag

SEQ ID NO: 3487 - DNA, 143 bp, homo sapiens
tatatatatatatatatatatatatatgaaatccagatggatcaagacttataaagaaatgcaaagctttaacgcgcacacacacacacacgtgaatatatatatatatatatatatatatatatatatgaaatccggatgga

SEQ ID NO: 3488 - DNA, 123 bp, homo sapiens
acctttctaccataatgtatggaggtaagtttgtgaatttattcaaaaatcaggcctggtcaacctcaaagtccaaattattaacctttctaccataatgtatggagctaagtttgtgaattt

SEQ ID NO: 3489 - DNA, 163 bp, homo sapiens
acaccaatcagcactctgtgtctagctcagggattgtaaacgcaccaatcagcatcctgtcaaaaaatggacgcatctgctctttgtaaaacggaccaatcagctctctgtaaaacggaccaatcagctctctgtaaaacagaccaatcagctctctgtaaaa

SEQ ID NO: 3490 - DNA, 205 bp, homo sapiens
gagctacccacttcaggtatcctccgcttgtggggacgacctgcctgtgcaaaggagctacccactgtgggtctcctctctgctgagagctggacactcagcctgtggaaatgagctacccactgtgggtctcctcttcactgacggctgtactcatcaggatgacctgcctacagaaaggagctatccactttgggtcctgaga

SEQ ID NO: 3491 - DNA, 326 bp, homo sapiens
atgcgccaatcagcactgtgtgtctagctgcgggttggggggcgggggttggtttgtggatgcaccaatcagcactctgtatctagctaatttggtggggacttggacaacatttatgtgtagctagaggattgtaaatgcaccaatcagcactctgtgtctagctcagggattataaatacaccaatcagcattctgtgtctagctaaaggtttgtaaacgcaccaatcagtgctctgtgtctagctaatctagtggggactcagagaacttctgtgtctagctcaaggttcgtaaatgcaccaatcagcagcctgtgaaaaatg

SEQ ID NO: 3492 - DNA, 312 bp, homo sapiens
ttgtgaatgcaccaatcggcactctatctagctcaaggtttgtaaatgcaccaatcaccgctctgtgtctagctaatctggtggggacttggagaatctttaagtctagctaagggattgtgaatgcaccaatcggcactctgtatctagctcaaggtttgtaaacacaccaatcagcaccctgtgtctggctcagagtttgtgaatgcaccaatcgacactctgtatctagctaatgtagtggggatgtggagaacttttgtgtctagctcagggattgtaaacgcaccaatcagcaccctgtcaaaacgg

SEQ ID NO: 3493 - DNA, 190 bp, homo sapiens
aaacacactaatcagcactctgtgtttagctaaaggtttgcaaacgcaccagtcagcactctgtgtctagctaatcaggtggggacttggagaacttttgtgtctacctaaaggattgtaaacgcaccaatcagcactctgtaaaacggaccaatcagcactctgtaaaatggaccaatcagcaggatgt

SEQ ID NO: 3494 - DNA, 317 bp, homo sapiens
gctagatacagagtgtggacacaaaggttctccaagaccccaccagagtagctagatacagagtgttgattggtgcactcacaaaccctgagctagacacagggtgctgattggtgtgtttacaaaccttgggctagatacagagtgccgattggtgtatttacaatccctgagctagacatgaaggttctccaaggccccaccagagcagctagatacagagtgtcgattggtggattcacaaacctcgagctagacacagggtgctgattggtgtgtttacaaaccttgagctagatacaaagtgcccattggtg

SEQ ID NO: 3495 - DNA, 65 bp, homo sapiens
tgtgtctagctaaaggattgtaaatgcaccaatcagcactctgtgtctagctcaagattcctaaa

SEQ ID NO: 3496 - DNA, 91 bp, homo sapiens
atcgcagctgaggttgaaggaataaaaatacaaacaagcgatagtaagtacaaataaggaccacatcgcagctgaggttgaagtaataaaa

SEQ ID NO: 3497 - DNA, 115 bp, homo sapiens
ggccaggcttcatccggagcagcgagacaagagcagcgtgtcagaaccaccaaacatgagcacaggtcttgagagatggggtaggcggccgggcttcatccggagcagcgagaca

SEQ ID NO: 3498 - DNA, 102 bp, homo sapiens
cccaccgctggcctctgcttgtctctgaactcacgcgctggccccgcggggacacacctgcctccctccactcagccgcccaccgccggcctctgcttgtct

SEQ ID NO: 3499 - DNA, 95 bp, homo sapiens
tgtattaaaatgccaacctttcctcatcttggacatttgctttaaaaagcaatcaggttaaatttatcctgtgtattaaaatgccaacttttcct

SEQ ID NO: 3500 - DNA, 102 bp, homo sapiens
tgattttcagtttgtttagctttttccttatcctgtggcctcaattttctgagggatataagggaagttgctgattttcagtctgtttagctttttccttat

SEQ ID NO: 3501 - DNA, 81 bp, homo sapiens
tcatcagtgatcttagctagatcttccgagtgtgttgtttcacatagccacattcatcagtgatcttagctagatcttccg

SEQ ID NO: 3502 - DNA, 78 bp, homo sapiens
aggaccaattcccactgactaaatcccccaccccaggcataatgtaaatgggcaggaccaattcccgctgactaaatc

SEQ ID NO: 3503 - DNA, 106 bp, homo sapiens
gtgagcagcggcggcaggggaggaggtggaacccgcggcgagctgctgcttcacactgacttacaccgtgagcagcggcggcaggggaggaggtggaacccgcggc

SEQ ID NO: 3504 - DNA, 100 bp, homo sapiens
acaatattactttcttttcacttattactatcacttattacttattattcacttttcacttattaccaatattattacaatattactatcttttcactta

SEQ ID NO: 3505 - DNA, 144 bp, homo sapiens
ggaggtaatgggccagcctaagaatcaaaagtgacaatgaaatataaaatgtataaccatgattgctttaaagagatttgtttcagttccttgtttgagggaggtaatgggccagcctaagaatcgaaagtgacaatgaaatat

SEQ ID NO: 3506 - DNA, 97 bp, homo sapiens
catgagtcaagtttggggctattagacctaagttggtgggggcgggggaacaacacactccttgtagtgaccatgagtcaagtttggggactattag

SEQ ID NO: 3507 - DNA, 79 bp, homo sapiens
gctagcttggcatttgggaagtgttgtgcccagatgtggactacactcacagtggagctagcttggcatttgggaagtg

SEQ ID NO: 3508 - DNA, 97 bp, homo sapiens
atatataatagtttaaaaacaatagcaaaatagtttctagtaatgctatatacatatatacatacatatataatagtttaaaaacaatagcaaaata

SEQ ID NO: 3509 - DNA, 111 bp, homo sapiens
ttgcagtgagtgttacagctcttaaaggtggtgcgtccagagttgtttcttcctcccagtgggattatggtctcgtgcagaccttgcattgagtgttacagctcttaaagg

SEQ ID NO: 3510 - DNA, 81 bp, homo sapiens
ccttgtgtatttctgtatgtttcagatctccctttcccatcttcatgtgaccttttccttgtgtatttctatatgtttcag

SEQ ID NO: 3511 - DNA, 181 bp, homo sapiens
atctcaagaaagaaaggaagaaagagagggggagagagagagagacagagagagagaaaaagaaacaaagaaagaaacaaagaaacaaagaaagaaagaaagaaagaaaaagaaagagaaagaaagaaagaaagaaacaaacaaacaaacaaagaaggaaagaaagaaagaaggaaagaga

SEQ ID NO: 3512 - DNA, 146 bp, homo sapiens
ggggcgaatggccgcggactacacttcccgaagtgccgcgcgaggtattctcggcggtgattggggcaaacggccacggactacacttacttacatgccgcgcgaggcgcctccgccgccggggcaaacggccacgaactacactt

SEQ ID NO: 3513 - DNA, 81 bp, homo sapiens
gagattctgcatagtttccggagcagagaggttaccagaggattatctgccccagagagattctgcatagtttccggagca

SEQ ID NO: 3514 - DNA, 94 bp, homo sapiens
agtgggtgagacgacgagcccattaggaggaacggaacactcactgcgaaagttgcaatttcatttctatagtgggtgagacgacgagcccagt

SEQ ID NO: 3515 - DNA, 112 bp, homo sapiens
actgtgtcaggggatttaatttgaaatactgaactggagaaaccaaagcaggatattcggaggagaagtcagtgcacatgagttttactgtgtcaggggatttaatctgaaa

SEQ ID NO: 3516 - DNA, 149 bp, homo sapiens
tactatagttatttgcatatattcattcaaaatctattttctggctgtgtgtcttggcccattttctggctgtgtgccatggctcatgccatcacggatactatagttatttgcttatattcattcaaaatctattttctggctgtgtg

SEQ ID NO: 3517 - DNA, 87 bp, homo sapiens
gctgggattacaggcatgtgccaccatgcctggctaattttgtatttttagtagcccaaagtgctgggattacaggcatgagccacc

SEQ ID NO: 3518 - DNA, 133 bp, homo sapiens
ttcggcaacttccgcccaggaccatgtccagctgggcaactcggacataaaccaaacactaatgcagagggtgagtgccctcccagcgtggcttcggcaacttccgcccaggaccatgtccagctgggcaact

SEQ ID NO: 3519 - DNA, 186 bp, homo sapiens
agctagatatagagtgttaattggtgcattcacaaaccttgagctaaacacagggtgctgattggtgtgtttacaaaccttgagctagatacagagtgctgattggtgtatttacaatccctgagctagacataaaggttcttcatgtccccaccagagcagctagatacagagtgttgattggtg

SEQ ID NO: 3520 - DNA, 110 bp, homo sapiens
cagggcccgcctccccgccagggggcgatccacctccacttcctgtttccgcagccgccctaccaggagcctggcactctcctcagggcccgcctccccgccagggggcg

SEQ ID NO: 3521 - DNA, 86 bp, homo sapiens
gaccaaaaaagctcagcgacatctagtggctccttcccacccagcactgatgaacatcttaaagaccaaaaaagctcagcgacatg

SEQ ID NO: 3522 - DNA, 106 bp, homo sapiens
aatattatgtcatatggatcctggatccatatgacagcttcttctcagggccttagatattctattgtatggttggatccaatattatgtcatatggatcctggat

SEQ ID NO: 3523 - DNA, 123 bp, homo sapiens
gggactaatgagaggctgaagtgaagttacaaagttacactcctatgcaaatgaagacttggcctgtgaccagtctgattggttgcaggaggggactaatcagaggctgaagtgaagttacaa

SEQ ID NO: 3524 - DNA, 83 bp, homo sapiens
tttgaaaggtactggccatatattgttactcagtctttctttatcatgactttgatatgtttgaaaggtactggccatatatt

SEQ ID NO: 3525 - DNA, 73 bp, homo sapiens
ttgaaaaagttaacagatgttgtcattttgagtggtagactctaatgaattgaaaaagttaacagatgttgtc

SEQ ID NO: 3526 - DNA, 79 bp, homo sapiens
gagctcactctgccagaaaagctctatttgcagtcactatctgacctgacttggagctcactctgctagaaaagctcta

SEQ ID NO: 3527 - DNA, 99 bp, homo sapiens
gaaaccctgtctctacaaaagtacaaaaattagccaggttgggagttcaagatcagcctgaccaacatggagaaaccctgtctctactaaaagtacaaa

SEQ ID NO: 3528 - DNA, 92 bp, homo sapiens
caccacagatactcctgagagattggatcaatgagtcccagctacttccctgtgatgctcctcccaccgcagatactcctgagagattggat

SEQ ID NO: 3529 - DNA, 203 bp, homo sapiens
gttgtccaggctggagtgcagtggcttttttttttttttttttttttttttgagatagagttttgctcttgttgcccaggctggagtgcagtggaaaaagaagtgatctctttgctctgaactcctggattttgtatgtatttaattttttttattatatgttagattacgtctcaaaaaaagtgatctctttgctctgaact

SEQ ID NO: 3530 - DNA, 88 bp, homo sapiens
taaagacctttttaatttattacttatattattttaatttattttgagaaaggttagggtaaagacctttttaatttattactatatc

SEQ ID NO: 3531 - DNA, 158 bp, homo sapiens
caccaatcagcactctgtatctagctcaaggtttgtaaacacaccaatcagcaccctgtgtgtagctcagggtttgtgaatgcaccaatcaacactctgtatctagctattctggtggggccttggagaacctttgtgtcgacactctgtatctagct

SEQ ID NO: 3532 - DNA, 104 bp, homo sapiens
caccaatcggcactctgtacctagctaatctggtgggggcctgaagaatctttatgtctagctaagggattgtgaatacaccaatcggcactctgtatctagct

SEQ ID NO: 3533 - DNA, 112 bp, homo sapiens
tcaaacattggattccaaattctccagttttgagacttggcctggctcttcccatgctggatgcttcctgccctcaaacattggattccaaattctccaattttgagacttg

SEQ ID NO: 3534 - DNA, 91 bp, homo sapiens
tgagaaatgacagttcacagtatatgttaaaacaaataaattttctgtccaattcctggaataaaacatgagaaatgacagttcacagtat

SEQ ID NO: 3535 - DNA, 85 bp, homo sapiens
tacttcagtggactttcattttcagtggactttcaaatatttaaccaacatttattaagcatttcttcagtggactttcattttc

SEQ ID NO: 3536 - DNA, 103 bp, homo sapiens
cagtggcctaacacaataaccaaatgtcgtgtgtgtgtgtgtgtgtgtgtgtgtgtgtgtgtgtgtgtataaaaccagtggcttaacacaataaccaaatgtc

SEQ ID NO: 3537 - DNA, 100 bp, homo sapiens
tttataaccaactcatctttgacaaaagcaacgagaacatgcaatagggaaagggcagtttctttatctttataaccaactcatctttgacaaaggcaac

SEQ ID NO: 3538 - DNA, 181 bp, homo sapiens
gcaccaatcagcgctctgtgtctagctaaaggtttgtaaacacaccaatcagcagtctgtaaaaacgcaccaatcagcgctctgtatctagttaaatgtttataaatgcaccaatcagcactctgcaaaaacggaccaatcagcactctctaaaatggaccaatcagcgctctgtaaagtg

SEQ ID NO: 3539 - DNA, 126 bp, homo sapiens
ataaatgtccatgaaatcttcacaatttatgttcagagactgcagtaaagacaggcgttaagaaattataaaagtattaatttggggaactaataaatgtccataaaatcttcacaatttatgttc

SEQ ID NO: 3540 - DNA, 112 bp, homo sapiens
ctcagtcctctttgtggtctaggaggataggcaagggtgcaggttttcgagaatgcatcagtaaggaccactaaatccgacctgcctcagtcctccttgtggtctaggagga

SEQ ID NO: 3541 - DNA, 120 bp, homo sapiens
cctaggtatcatttttgcataatgtgtgtgtatacatatatacacacacctaggtatcatttatatatacacacacacacacacacacccctaagtatcatttttgcataatgtgtgtgt

SEQ ID NO: 3542 - DNA, 108 bp, homo sapiens
caccaatcggcactctgtatctagctcaaggtttgtaaacacaccaatcagcaccctgtgtctagctcagggtttgtgagtgcaccaatcgacactctgtatctagct

SEQ ID NO: 3543 - DNA, 156 bp, homo sapiens
ggtccattttacagagtgccgattggtgcatttgcaaacctttagctagacacagagtgctgattggtgcgtttacaatcctttggctagatacaaaagttctccaagtcctgaccagattagctagacacagagcgctgattggtgcgtttacaa

SEQ ID NO: 3544 - DNA, 124 bp, homo sapiens
ggtacatgtgcaggatgtacaggtttgttacataggtaaacctacacaggtttgttacaggtttgttacataggtaacttttaagttaatgggtacatgtgcgggatgtacaggtttgttacat

SEQ ID NO: 3545 - DNA, 95 bp, homo sapiens
ggtacatgtgcaggatgtacaggtttgttacataggtgcaggatgtacaggtttgttacataggtacatgtgcaggatgtacaggtttgttacat

SEQ ID NO: 3546 - DNA, 156 bp, homo sapiens
acaggcataggaaatcacaagggtattgtgatacccttgtgatacaagggtatcacaaggcataggaaatcacaaggggaagtgataagtgtccatgaaatcttcacaatttatgttcagagattgagtaaagacaggcataagaaattataaaag

SEQ ID NO: 3547 - DNA, 95 bp, homo sapiens
gactttttgcagtgtggaccaaaagtcaggcctgtgacctttttgcagtatggaccaaaggtcaggcctgtgacctttttgcagtgtggaccaaa

SEQ ID NO: 3548 - DNA, 73 bp, homo sapiens
gtggggacacagccaaaccatatctaactcagcttgtggtgagatttgggtggggacacagccaagccatatc

SEQ ID NO: 3549 - DNA, 77 bp, homo sapiens
gtacccataattaaaaacttaaaaattaattttaaaataattgtaatattatgtacccataattaaaaaattaaaaa

SEQ ID NO: 3550 - DNA, 97 bp, homo sapiens
gctgggattgcaggcacgtgccaccacgcccagctaatttttgtatttttagtagagacggggtcaaagtgctgggattacaggcacgtgccaccac

SEQ ID NO: 3551 - DNA, 109 bp, homo sapiens
ctttttaagagtgaatttttaaaaatataatagattcttaaaaatagattcacttaaaaagtgaattcactttttaagagtgaatttttaaaaatataatagattctta

SEQ ID NO: 3552 - DNA, 106 bp, homo sapiens
ttagcagggttagaatccctcctaagaaacaggcagttaaaggtctttgggttaatccccgggttaaaatgcccaatttagcagggttagagtccctcctaagaaa

SEQ ID NO: 3553 - DNA, 92 bp, homo sapiens
aggaggaaaacgtttattttttgttaatatgtgtttagatctatataatctataaagatacattacaggaggaaaacttttattttttgtta

SEQ ID NO: 3554 - DNA, 77 bp, homo sapiens
acgccattttatataagggactttatataagtgactaggttataggcaaatattacaccattttatataagggactt

SEQ ID NO: 3555 - DNA, 74 bp, homo sapiens
tggagctgcctgccagtcccgcaccgtgtgcctgcacaccggggctgtaaatggagctgcctgccagtcctgca

SEQ ID NO: 3556 - DNA, 118 bp, homo sapiens
agaatgcattggtaagggccactaaatctgacttttctcagtcctctttgtggtctaaagacgaaaggcaagggtgcaggtttttgagaatccattggtaagggccactaaatctgac

SEQ ID NO: 3557 - DNA, 90 bp, homo sapiens
caggttagtggagggtgcttagtccttcccaagagctacctgcagaaaacgtcactgacaggttagtggagggtgcttagtccttcccaa

SEQ ID NO: 3558 - DNA, 76 bp, homo sapiens
aacacagaatcaggcaaccctaagatgccttagctttactcaaaaacaaagataacacagaatcaggcaaccctaa

SEQ ID NO: 3559 - DNA, 93 bp, homo sapiens
tatctctgtgccccgatcccttatttccatgcccagacctcttatatctctgcgccccaatcccttatttccgtgccccaaccgcttatatct

SEQ ID NO: 3560 - DNA, 116 bp, homo sapiens
attgtaaatgcacccatcagcactctgtgtctagctaatggggcggggacttggagaacttttgtgtctagctaaaggattgtaaatgcaccaatcagcactctgtgtctagctaa

SEQ ID NO: 3561 - DNA, 126 bp, homo sapiens
atcaacccatcagataagcaggtccttacatttatataaaatgcagttacacacaacaagatgagatttgggtggggacacagtcaaaccctatcaacccatcagataagcaggtccttacattta

SEQ ID NO: 3562 - DNA, 85 bp, homo sapiens
cctgggattcaaaatataaacatcatatttttataacgcctggaattcagtaaaagcctgggattcaaaatataaacataatatt

SEQ ID NO: 3563 - DNA, 93 bp, homo sapiens
gttttaattgggacatagccatgctcattcctgctcctggtaccacacctgttttgtaaataaagttttaattgggacatagccatgctcatt

SEQ ID NO: 3564 - DNA, 78 bp, homo sapiens
aaatatgatgtctgtctcttgaaaacgtctgtctcttgaaatatgtctgtctcttgaaatatgtctgtctcttgaaat

SEQ ID NO: 3565 - DNA, 90 bp, homo sapiens
tttttttattacactaatgacttatcctcagaggacaatggataataggtgttatataagcacacaatttttttattatactaatgactt

SEQ ID NO: 3566 - DNA, 106 bp, homo sapiens
tttaaaagtatgtgtgtgattaaaaaatatatatagatgcatatctattttattttttaatataaagaattaaaaaatttaaaagtgtgtgtgtgattaaaaaata

SEQ ID NO: 3567 - DNA, 94 bp, homo sapiens
aaagctaaaaaataaaaataaaaatgatggggtggggtggcccaagagtctatcccatcttccccaaagctaaaaaataaaaataaaaatgatg

SEQ ID NO: 3568 - DNA, 94 bp, homo sapiens; identical to SEQ ID NO: 3567

SEQ ID NO: 3569 - DNA, 121 bp, homo sapiens
atatatataatttaaacaaaaatagactattagtttaatagatgtagtagattttttaaaactttagtgagagatatatcatatgtataatatatataatttaaacaaaaatagtctatta

SEQ ID NO: 3570 - DNA, 186 bp, homo sapiens
agctagatacagagtgtcgattggtgcattcacaaaccttgagctaaacacagggtgctgattggtgtgtttacaaaccttgagctagatacagagtgccgattggtgtatttacaatccctgagctagacataaaggttctccaaggccccaccagagcagctagatacagagtgtcgattggtg

SEQ ID NO: 3571 - DNA, 81 bp, homo sapiens
ttattttattagtttttctcatattattagtttttctcatatttcagtgaaatttcttatattattagtttttctcatatt

SEQ ID NO: 3572 - DNA, 94 bp, homo sapiens
gtagtcgcagctacttgggaggctgaggtgggaggatcctgggaggcactcgcctatagtcccaagtagtcgcagctacttgggaggctgaggt

SEQ ID NO: 3573 - DNA, 88 bp, homo sapiens
taattacaagccctgatcgctgtcgatattggtggggacactgcaggctgcactgtatgtctggtaattacaagccctgatcactgtc

SEQ ID NO: 3574 - DNA, 96 bp, homo sapiens
gataaagtgggataaatttacatgacagataaatttacattcccagtatttcccaaactgtggatggagataaagtgggataaatttacatgacag

SEQ ID NO: 3575 - DNA, 98 bp, homo sapiens
acttcatcttggatctttctagatatttcttggatctttcttgaattacaacacatgactgcagatttgatgctccatcttggatctttatggatatt

SEQ ID NO: 3576 - DNA, 111 bp, homo sapiens
gttccagagagtgaataaagagagccaaactgagagtgaataaagagagtgaataaagagaattccagagagtgaataaagagagccaaataaagagagtgaataaagaga

SEQ ID NO: 3577 - DNA, 101 bp, homo sapiens
gaggtcaggagtttgaggccagcctaagcatagtcccagctacctagggggcaaaggtgggaggatcactggaggtcaggagtttgaggccagactaagca

SEQ ID NO: 3578 - DNA, 114 bp, homo sapiens
gttacacagttactaaatagcacaggtagactcagaaccatattactatccccactgcacaaagaaattgaggcagagagaagttacacagttactaaatagcacaggtggact

SEQ ID NO: 3579 - DNA, 105 bp, homo sapiens
tgtgatctttattggacccttatcagtggttctgcttttaccctttgccctgtcccctcagaagcatgtgatctttgttggacccttatcagtggttctgctttt

SEQ ID NO: 3580 - DNA, 104 bp, homo sapiens
agaaaagaagtgggaatataaaggtaggagaggtattacttgaatgtgacgcataaaaagtatataagtagacagaaaagaagtgggaatatacaggtaggaga

SEQ ID NO: 3581 - DNA, 101 bp, homo sapiens
tgggtaaataaatggagcatgtgtaccctttcacttttttctgcgtgggaagaaaagggacttcaatcgatgagactgggtaaataaattgagcatgtgta

SEQ ID NO: 3582 - DNA, 81 bp, homo sapiens
taagggcaggatttatagtaagtatgtgtttacaataatatcaagattgttttgacttaagggcaggatttatggtaagta

SEQ ID NO: 3583 - DNA, 149 bp, homo sapiens
tcctgtctaggggactaccttttttattagctttttcaaagaataataaggtgttggttttactgattctctgcattatctttttgttattttctattaactttcctgtctaggggactatcttttttattagctttttcaaagaataa

SEQ ID NO: 3584 - DNA, 89 bp, homo sapiens
tacttgggaggagtggggtgaaagtgtattcagcacaaatattcctactattgcgaaactacatcatacttgggaggagtggggagaaa

SEQ ID NO: 3585 - DNA, 96 bp, homo sapiens
ccccactcctcccaagtatgatgtagtttcgcaatagtaggaatatttgtgctgaatacactttcaccccactcctcccaagtaggatgtagtttc

SEQ ID NO: 3586 - DNA, 88 bp, homo sapiens
agtcagataaatagtccctttgttctcctgtgagaacacataaataattaaatagataaatatgagtcaaataaatagtccctttgtt

SEQ ID NO: 3587 - DNA, 81 bp, homo sapiens
aggcactgacactactgctagaccaaggtctgctaagtaacgggtgccttcccaggcactggcactactgctagaccaagg

SEQ ID NO: 3588 - DNA, 94 bp, homo sapiens
tgaggtgggaggatcgattgagcccaggaacttggtggcacatgcctgtggtcccagctactgggaaagttgaggtgggaggatcgcttgagcc

SEQ ID NO: 3589 - DNA, 182 bp, homo sapiens
taaaagtatactgtggttttggcatttatttaaatgtataaaaacatgtacacatttatttaaatgtataaaaacatgtacacatttatttaaatgtataaaaacattgcttctcggccttttggctaagatcaagtgtaaatgtataaaaacatttacacatttatttaaatgtataaaaa

SEQ ID NO: 3590 - DNA, 108 bp, homo sapiens
agctagatacagagtgtcgattggtgcattcacaaaccctgagctagacacagggtgctgattggtgtgtttacaaaccttgagctagatacagagtgccgattggtg

SEQ ID NO: 3591 - DNA, 116 bp, homo sapiens
cttccctacacctggtagtaaatgtacctcatttactaccttcaaaattcagtgccttcaaaattcagtgccttcaaaattcaaacttccctgcacctggtagtaaatgtacctca

SEQ ID NO: 3592 - DNA, 90 bp, homo sapiens
attctcctgcctcagcctccccgtagctgggactacaggcatggccatcatgcccagctaattttttattctcctgcctcagcctccccg

SEQ ID NO: 3593 - DNA, 108 bp, homo sapiens
tatctagctaacctggtggggacttggagaatctttaggtaaggagtgtgaatacaccaatcggcactctgtatctagctaacctggtggggacttggagaatcttta

SEQ ID NO: 3594 - DNA, 73 bp, homo sapiens
aggttctccacgtccccaccagattagttagatacagagttttgacacacaggttctccacggccccaccaga

SEQ ID NO: 3595 - DNA, 255 bp, homo sapiens
ggcgcggtggctcacgcctgtaatcccagcactttgggaggcgcggtggctcacgcctgtaatcccagcactttgggaggcgcggtggctcacgcctgtaatcccagcactttgggaggccgaggcgggcggatcacctgaggtcgggagttccagaccagcctgaccaacatggagaaacccccatctctactaaaaatacaaaattagccgggcttggtagcgcatgcctgtgatcccagctactcgggaggc

SEQ ID NO: 3596 - DNA, 162 bp, homo sapiens
aactaatgcaaaattttgttttctctttttgtgcatctaatgtgcactaatgtaaaatctttttgtgcaactaatgcaaaattttgttttctctttttgtgcacaacatcaagtgttctgcatcagttgataactaatgcaaaattttgttttctctttttg

SEQ ID NO: 3597 - DNA, 96 bp, homo sapiens
agggtctcctctctgctgagagctgaaaaggcaatggtacggccagctgtgaaaggagctatccacctcagggtctcctctctgctgagagttgaa

SEQ ID NO: 3598 - DNA, 90 bp, homo sapiens
cagtttaaatctacataacaaaccttttctatctgtaaaggtacaactctactaatggagaagacagtttaaatccacataacaaacctt

SEQ ID NO: 3599 - DNA, 114 bp, homo sapiens
tgcgatctcggctcactgcaacttccacctcctggattcaagtgagtctcctgcctcagccttctgagtagctgggaatgcagatgcgatctcggctcactgcaacttccacct

SEQ ID NO: 3600 - DNA, 138 bp, homo sapiens
taaacaccaaaaatatacatgttactactagcttttataggactactatatatagtactatatatatatgcacacacacacacacacacacacacatataaacaccaaaaatatacatattactactagcttttatag

SEQ ID NO: 3601 - DNA, 91 bp, homo sapiens
aaggcaggtaaagtgtatccatcatcaacaaaatttagcattactgaattagggtgtgtaagaaggcagataaagtgtatccatcatcaac

SEQ ID NO: 3602 - DNA, 91 bp, homo sapiens; identical to SEQ ID NO: 3601

SEQ ID NO: 3603 - DNA, 107 bp, homo sapiens
ggactccactgaattagtacaggcaagtcactataaaaatatctgaaccctcatactgcaagggaaagggactccacagaattagtacaggcaagtcactataaaaa

SEQ ID NO: 3604 - DNA, 81 bp, homo sapiens
aaaatgtgggaaagtttggaacttcctcaagacttggagggctcagaagacaggaaaatgtgggaaactttggaacttcct

SEQ ID NO: 3605 - DNA, 124 bp, homo sapiens
gaacataaattgtgaagatttcatggacatttagcagttccccaaattaatacttttataatttcttacacctgtctttactgcaatctctgaacataaattgtgaagatttcatggatattta

SEQ ID NO: 3606 - DNA, 115 bp, homo sapiens
tccaaagccaacagccctagagcagttagaggaggacattagagaatgagctgagacaggcctgactgcttggacattctgtccaaagccaacagccctagagcagttggaggag

SEQ ID NO: 3607 - DNA, 75 bp, homo sapiens
tggggccttggagaacctttgtgtccatactgtgtatctaactaatctgatggggacttggagaacctttgtgtc

SEQ ID NO: 3608 - DNA, 99 bp, homo sapiens
gcctgtaattccaacactttgggtggccgagggatgattgcttgcgtccaggagttccaggccatggctcatgcctgtaattccaacacttggggtggc

SEQ ID NO: 3609 - DNA, 116 bp, homo sapiens
gctactcggatggctgaggcaggagaatagcttgaacccgggaggtggagcaattagccgggcgcggtggcgggcgcctgcagtccctgctactcggaaggctgaggcaggagaat

SEQ ID NO: 3610 - DNA, 106 bp, homo sapiens
ctatttttacttttttggggggcggggggacagtcttactctttttagtttacatcattttccttgtgactattctatttttacttttttagggggcggggggaca

SEQ ID NO: 3611 - DNA, 96 bp, homo sapiens
gtgtgagattaacttcatttatcctgctcagagtaaatggaagcattcaggattttccattgtgggtgtgagattcacttcatttatcctgctcag

SEQ ID NO: 3612 - DNA, 110 bp, homo sapiens
cttggtcctctttgtggtctaggagaacaggcaagggcgcaggttttcgagaatgtgtcagtaagggccactaaatccgaccttccttggtcctccttgtggtctaggag

SEQ ID NO: 3613 - DNA, 110 bp, homo sapiens
gaaattgaggaataagaaatctctataataaaagaattttttataataaattctgtattctattataattctataataaaggaaattgagaataagaaatctctataata

SEQ ID NO: 3614 - DNA, 100 bp, homo sapiens
gagcttgcagtgagctgagatcgcgccactggaggctgaggcagaagaatggtgtgaacccgggaggcggagcttgcagtgagctgagattgcgccactg

SEQ ID NO: 3615 - DNA, 87 bp, homo sapiens
tcctgaaaggcctcagagaacactgcaggcgcaggcctgcagggcggggctgaggactggggatcctgaaacgcctcagagaacact

SEQ ID NO: 3616 - DNA, 100 bp, homo sapiens
ccttccccagcctcagtttccccgcctatagggctccctgacctgagagatgatgcttccacttcccttccccagcctcagtttccccacctatagggct

SEQ ID NO: 3617 - DNA, 187 bp, homo sapiens
cttgaggccaggagtttggcaggagacccaggtcaacccataacagacagcattacaaacaatgaaggatggcttgaggtcaggagttcgagaccagcctgggcaacacagtgagacccctgtctctacaaaaaatttaaaaacaagcaggcggatcacttgaggtcgggagttcgagaccagcctg

SEQ ID NO: 3618 - DNA, 80 bp, homo sapiens
catgtatgagttcatagcctcatcacacacactaaatctggcccacctgtatcagcatgtatgagctcatagcctcatca

SEQ ID NO: 3619 - DNA, 75 bp, homo sapiens
gcatggttaatattttttatttttaaaataatatatttattaaccaccaagcctggttaatattttttattttta

SEQ ID NO: 3620 - DNA, 126 bp, homo sapiens
ccaaagtgctgggattacaggcgtgagccactgcgcctggtcccaggctagtctagaactcctggactcacgggatccacccaccttaacctgccaaagtgctgggattacaggcatgagccactg

SEQ ID NO: 3621 - DNA, 87 bp, homo sapiens
acctcctgggttcaagcgattctcctgcagaggcgtgatcttgactcactgtaacctctacctcctgggttcaagcaattctcctgc

SEQ ID NO: 3622 - DNA, 104 bp, homo sapiens
tgaagtctttcctactagaccatgtgaaagaggactctaatccttcatttatgctattactactgaatgaagtctttcctactagaccatgtgaaagaggactc

SEQ ID NO: 3623 - DNA, 111 bp, homo sapiens
tgcagaaacagaaataagaactaaggcttttaggattatttgatattattttagaagctctggtcaatgcagtaaggccaatgcagaaacagaaataagaacaaaggcttt

SEQ ID NO: 3624 - DNA, 92 bp, homo sapiens
agacaggatcttgctctgttgtcttttctttttttgagacaggatactcttttattttttctttttttgagacaggatcttgctctgtcgtc

SEQ ID NO: 3625 - DNA, 112 bp, homo sapiens
ttttggaaataatggtgaaagaaatacctagccgagttgcttggacttacaggttatttcctaatttagctaataaacatggtagttttggaaataatgctgaaagaaatac

SEQ ID NO: 3626 - DNA, 107 bp, homo sapiens
ctggaaaaaagagatggtaaagagcctgtggagcctgtaacccactcctgagtagctgggactacaggtgtgcaaaaccacgtctggaaaaaagagatggtaaagag

SEQ ID NO: 3627 - DNA, 95 bp, homo sapiens
taagttatattgacaaaaaagtactgtaactcatatagtcttttatgtaagttaaaagctgtctttcatctaagttatattgacaaaaacgtact

SEQ ID NO: 3628 - DNA, 113 bp, homo sapiens
gtttgaggccaggagtttaagaccaatctcaggagttggattggtctcgaacaactcaaacaactctcccaaggtggtagaatcgtttgaggccaggagttcaagaccaatct

SEQ ID NO: 3629 - DNA, 110 bp, homo sapiens
ggccctgtcaaaaatacacatctattactcgggagggtgaattctgggcataaggccttgtttccagaaaggccctgtcaaaaatacacatctattacttgggagggtga

SEQ ID NO: 3630 - DNA, 88 bp, homo sapiens
tgttttgcatgtttttaagcttttttactacacatctatgtacccctaaaaaaaaaaagtattgttgttttgcatgtttttaagctta

SEQ ID NO: 3631 - DNA, 77 bp, homo sapiens
tactctctttagctgtggactgtcagaactcagaagttctgagggcaaacttcctactctctttagctgtgggctgt

SEQ ID NO: 3632 - DNA, 92 bp, homo sapiens
cgcctggtggcacgtgcttgtggttccacacacacacacacacacacacacacacccccacacacgcctggtggcacgtgcttgtggttcca

SEQ ID NO: 3633 - DNA, 115 bp, homo sapiens
ctcggtcctctttgtggtctaagaggaaaggcaagggtgcaggtttttgagaatgtggtggttaagagccactaaatctgaccttcctcggtcctctttgtggtctaggaggaaa

SEQ ID NO: 3634 - DNA, 110 bp, homo sapiens
ttaatatagatatacaaaaatatagaaatgtgtggaatacacatacattgaaactgaaggtgtcagtatgaactcatggtttttaatatagatatacaaaaatatagaaa

SEQ ID NO: 3635 - DNA, 74 bp, homo sapiens
attattggccaggcatagtggctccatctaaaaaaaaaaaaaatgatgcaattattggccaggcatggtggctc

SEQ ID NO: 3636 - DNA, 124 bp, homo sapiens
accatgcctggctaattttttgtatttttagtagagacgaggtttcaccgtgttggtcctgtgattacaggtgctcgctaccatgcctggctaattttttgtatttttagtagagatgaggttt

SEQ ID NO: 3637 - DNA, 91 bp, homo sapiens
gcatccatgacaacatctatttttttttttttttttttggtggtagaagtgttccctgttcaccgcatccatgccaacatctatttttttt

SEQ ID NO: 3638 - DNA, 99 bp, homo sapiens
ccactcagttcatacctattgtctcagatgaaagtttcctacagtcaaacgtcacctacctttttatccattccactcagttcatacctattttctcag

SEQ ID NO: 3639 - DNA, 99 bp, homo sapiens
cacccaggaaaattcagagaggttggttttaagagaccaccgttctcccctacccccgccccccaactccctttcccacccaggaaaattcagagaggt

SEQ ID NO: 3640 - DNA, 243 bp, homo sapiens
ggattgtaaacacaccagtcagcactctgtgtctagctcaagtttcttaaacacaccaatcagcactctgtgtctagctcaaggtttgtaaacgcaccaatcactgctctgtgtctagctaatctagtgcggacttagagaacttttatgtctagctaaagaattgtaaacacaccaatcagtactctgtgtctagctcaaggtgcggctcaaggtttgtaaacgcaccaatcagcaccctgt

SEQ ID NO: 3641 - DNA, 209 bp, homo sapiens
ggattgtaaatgcaccaatcagcactctgtgtctagctcagtgattgtaaatacaccaatcagcactctgtgtctagctcagggattgtaaatgcaccaatcagcaccctgtcaaaatggaccaatcagctctctgtaaaatggaccaatcagctctctgtaaaatggaccaatcagttctctgtaaaatggaccaatcagcaggatgt

SEQ ID NO: 3642 - DNA, 99 bp, homo sapiens; identical to SEQ ID NO: 3638

SEQ ID NO: 3643 - DNA, 99 bp, homo sapiens; identical to SEQ ID NO: 3639

SEQ ID NO: 3644 - DNA, 124 bp, homo sapiens
agtaaagacaggcataagaaattataagagtattattagggaagtgataaatgtccatgaaatcttcacaatttatgttcagagattgcagtaaagacaggcataagaaattataaaagtatta

SEQ ID NO: 3645 - DNA, 157 bp, homo sapiens
tcctgacacagagctcctgagacccttataaatgggagtgctaagataatcttttgttctcatatttggtctttgacctctgctcctgacacagagctcctaagacctttctaatctcctgagtgataggagtgtctaacacagaggtcctacctcc

SEQ ID NO: 3646 - DNA, 112 bp, homo sapiens
gcctgtaatcccagcactttgggaggctgaggtgagtggatcacgaggtcaagagatcaagactgggccaggcacagtggcttatgcctgcaatcccagcactttgggaggc

SEQ ID NO: 3647 - DNA, 85 bp, homo sapiens
gagctctttatgtattagggagaaaagccctgataaaaaattttccttatttataggagctctttgtgtattagggagaaaagcc

SEQ ID NO: 3648 - DNA, 84 bp, homo sapiens
ttagtctctactaaaatacaaaaggaggagatcaagatcatcctggccaacatggtgaaatttagtctctactaaaataaaaaa

SEQ ID NO: 3649 - DNA, 91 bp, homo sapiens
ccattccctacccctccaaaaggtaatcttaggcattgcaggtaccttggcaacatgtcccccgccattccctatccctccaaaaggtaat

SEQ ID NO: 3650 - DNA, 87 bp, homo sapiens
gagtcctgctcgaggtctaggggtatccagagcagggtgggttagagagggaggcctaagagtcctgctcgaggtctaggggtatcc

SEQ ID NO: 3651 - DNA, 102 bp, homo sapiens
acagggctgtgtctccctcagactggggctccctgaggatgggactgcgtctctcctcggactggggttccctgtggacagggctgtgtctccctcagactg

SEQ ID NO: 3652 - DNA, 153 bp, homo sapiens
atgatgaagatgatctggatatgcttatcacctaatttttgtttattcctctctcttcccctgaattgtttaaaaaaaaaatggaacaaattttggccaatgatgaagatgatttggatatgcttatcacctaatttttgtttattcctctct

SEQ ID NO: 3653 - DNA, 116 bp, homo sapiens
attcaaattatttggtgcagcttgcttttagacaactatactttctcttatatttatgtacttaattatctttataaatgtgtggattcaaattatttggtgcagcttgcttttag

SEQ ID NO: 3654 - DNA, 102 bp, homo sapiens
tggtactaaatgctatgtggtactagatgtgtcaacacatataaggtggtactaactgctattattagcatgtaaggtggtactaagtgctatgtggtacta

SEQ ID NO: 3655 - DNA, 95 bp, homo sapiens
ccagcctccagggcaatgagaaatagccctcaccagaacgtgaccatgctggcaccctcatctcaggcctccagcctccagggcgatgagaaata

SEQ ID NO: 3656 - DNA, 110 bp, homo sapiens
aatttttgtatttttagtagagatggggtttcaccatgttgatcagactagtctcaaactcttgaccttgtgaaatttttgtatttttagtagagacggggtttcaccat

SEQ ID NO: 3657 - DNA, 102 bp, homo sapiens
tagaattagatagacttgtttaagcaatatagcaaataaaatatagaattctaattctataatgtagaattagatagacttgtttaagtaatatagcaaata

SEQ ID NO: 3658 - DNA, 117 bp, homo sapiens
tgagaagctgtatgaaaaaaaaaaaactgggataaggaaaaaaggagggtttgccattttagagtggccagaggcaaataatactgagaagctgtatgaaaaaaaataaactgggat

SEQ ID NO: 3659 - DNA, 148 bp, homo sapiens
atttcttggatttcatgtcttcctctgttttggttcatattttaattttgcgcagctgcaaatttagtacttattttattctgaggttggtgccacaatttcttggatttcatgtcttcctctgttttggttcatattttaattttgc

SEQ ID NO: 3660 - DNA, 105 bp, homo sapiens
ctgccttggcctcccaaagtgctgagattacagatgtgagctattgcacctggcctgaactcctgagtttaagtgatctgtctgcctcggcctcccaaagtgctg

SEQ ID NO: 3661 - DNA, 84 bp, homo sapiens
tcttcaaagggcctatggtgtggggtgaggatagagtggtagacagctacagtgcctgtcttcaaagggcctatggtgtggggt

SEQ ID NO: 3662 - DNA, 116 bp, homo sapiens
caagaaagcaaagaaagctggctcagtgaggtcctcagccccatcagcctagtcccaacccctcctccggcactgatatcaagaaagcaaagaaggctggctcagtgaggtcctca

SEQ ID NO: 3663 - DNA, 136 bp, homo sapiens
gatagttgcatcatgttaaatagaactattaccttgttattgtctcatttggaaattaaatataatttaagaagttctgtatggggtcaagtatggtgatagttgcatcatgttaaatagaactattaccttgtta

SEQ ID NO: 3664 - DNA, 82 bp, homo sapiens
gtattctgagagtccaattgtgatggaaaactagtattgtattccgaaattcatatgtattctgagagtccagttgtgatgg

SEQ ID NO: 3665 - DNA, 117 bp, homo sapiens
tattaagtaatacaatgtatgtaaaatacacagtctgggatgtatatcactaagaatcactgcttttcctgaatattaagtaatacaatgtatgtaaaatacacagtctgggatgta

SEQ ID NO: 3666 - DNA, 108 bp, homo sapiens
atagtggcatcactttgtggttttaactggcacgtccagacaaagacatatgtctttctaattttgatcattctgatagatgcatagtggcatcactttgttgtttta

SEQ ID NO: 3667 - DNA, 111 bp, homo sapiens
ccaggctgttttggttactgtagctttacagtatagtttgaattcaggttatgtgatgctgtttttgtaccagtgccaggctattttggttactgtagctttacagtatag

SEQ ID NO: 3668 - DNA, 98 bp, homo sapiens
attaataaataataattatacagatttatggagtacgtagtgatttatttaattattatttgattaataaataataattgtacagatttatggagtac

SEQ ID NO: 3669 - DNA, 83 bp, homo sapiens
tatagaatatatttagaaactttaaaataaactaaaaaataacacagataaaaattattatggaatatatttagaaactttaa

SEQ ID NO: 3670 - DNA, 93 bp, homo sapiens
tatttctgggaactcattttcatataaatctatttcattttctttaacctagcatctcccaaattgatatttctgggaagtcattttcatata

SEQ ID NO: 3671 - DNA, 150 bp, homo sapiens
ggtgggctcatggtctcgctggcttcaggagtgaagctgcagaccttcgcggtgagtgttacagctcttaaggtggcgcgtctcgagttgttcgttcctcccggtgggctcgtggtctcgctggcttcaggagtgaagctgcagaccttc

SEQ ID NO: 3672 - DNA, 82 bp, homo sapiens
agagcttaagttgtcaatctgtataatttgttgttcagacttgtgttcattgtaagatagagcttaagttatcaatctgtat

SEQ ID NO: 3673 - DNA, 109 bp, homo sapiens
gtgagaatgagattggggttgtgattaagggattgtgattttttaagggagaaagagacaaaaatgaagaaagttgggtgagaatgagattggtgttgtgattaaggga

SEQ ID NO: 3674 - DNA, 114 bp, homo sapiens
cttagcctctctgtctcttagatgacacaccaaagtaagtcaggatcttcctctgtcacttgcctctcatcttggttgcttagcctctctgtctcttagatgactcaccaaagt

SEQ ID NO: 3675 - DNA, 83 bp, homo sapiens
gaccccttctctccgtgtctctaccccttctccgcttttctagggggcaagaacccgctgaccccttctctccgtgtctctac

SEQ ID NO: 3676 - DNA, 128 bp, homo sapiens
atctcggctcactgcaacctccgcctcctgggttcaagcgattcccccgagtagctgggattataggtgcccgccaccatgcccgagtgcgatctcggctcactgcaacctccacctcctgggttcaa

SEQ ID NO: 3677 - DNA, 111 bp, homo sapiens
tgatccgcccacctcggcctcccaaaatgctgggattacaggcatgagccactgcgcctagcccagtcttggtctcttgacttcttgatccgcccaccttggcctcccaaa

SEQ ID NO: 3678 - DNA, 84 bp, homo sapiens
tgaatgtatcacctaatggtacctaatcaaaaacacttattttttttttttttgccacatgaatgtatctcctaatggtaccta

SEQ ID NO: 3679 - DNA, 117 bp, homo sapiens
gtccaatcacctcccaccaggccccacctccaacactggggatgatgtgaaaccattagaaaacaccacatcgtccaatcacctcccaccaagccccacctccaacactggggatga

SEQ ID NO: 3680 - DNA, 196 bp, homo sapiens
tgagctagacacagagcactgactggtgcatttacaaaccttgagctagacacagggtgctgattggtgcatttacaaacttgagctagacacagagcactgactggtgcattcacaatcctttagctagacataaaagtcctccaagtctccaccagattatctagatacagagtgctgattagtgcatccacga

SEQ ID NO: 3681 - DNA, 95 bp, homo sapiens
caaggacaaagacacatataaaagaccagaataaaagtcattaatacactactatccctgagctgttgaaccaaggacaaagacacatacaaaag

SEQ ID NO: 3682 - DNA, 109 bp, homo sapiens
tgataaatatttgttaatgaacacgtgagtaagtgaaaaatgaatgcttcagcattcattattgataaatactgataaatatttgttaatgaacatgtgagtaagtgaa

SEQ ID NO: 3683 - DNA, 97 bp, homo sapiens
aaacatttagtgagtatctgtgacatattaataataattataatgggttagtggagattagagtctcttcaattaaacatttagtgagtttctgtga

SEQ ID NO: 3684 - DNA, 145 bp, homo sapiens
gttggtgcaaaagtaattacggtttttgccattatcttcaatggcattattcaataatgccattattgcaattaaaattgtgtgattttattatgttggtgcaaaagtaattatggtttttgccattatcttcaatggcattatt

SEQ ID NO: 3685 - DNA, 122 bp, homo sapiens
agattatatacaatatattaagataagtcttacatatgtatgtatgtatactatatacaatatattaagataatatacaatataaaattaagattatatacaatatattaagataaatctta

SEQ ID NO: 3686 - DNA, 111 bp, homo sapiens
ttctttattaaaatgattaatcacaagtactaaggtagtttgaataccttatcttttacaagaaattatttatataattctttattaaaatgattaatcacaagtactaag

SEQ ID NO: 3687 - DNA, 106 bp, homo sapiens
caccaatcggcactctgtatctagctcaaggtttgtaaacacaccaatcagcaccctgtttagctcaaggtttgtgagtgcaccaatcgacactctgtatctagct

SEQ ID NO: 3688 - DNA, 105 bp, homo sapiens
tctcagagaattaaagtcaaagttccaaagttgtggtaactattttccaaaaaatatttactcttctcagagaattctcagagaattaaagtcaaagttccaaag

SEQ ID NO: 3689 - DNA, 102 bp, homo sapiens
gatctacttttataatatatataaaattatattatttttgtaatatatataaaaaatatgattttatatataaaaagatctatttttataatatatataaaa

SEQ ID NO: 3690 - DNA, 76 bp, homo sapiens
agaatctcatctgatttggcaaaactcagccacaccaggagttaaaccagaaagagtctcatctgatttggcaaaa

SEQ ID NO: 3691 - DNA, 131 bp, homo sapiens
tcagacagcactgctctagaacaaagctctactggacagcgctactttagaataatttgatatagaataatcccatcatcacagaagtttctgtcagacagcactgctctaaaacaaagctctactggaca

SEQ ID NO: 3692 - DNA, 76 bp, homo sapiens
acgtctgattgatgatccatgtgccattgagaaagtatgtagaagtgacatacgtctgattcatgatccatgtgcc

SEQ ID NO: 3693 - DNA, 94 bp, homo sapiens
ttttttttttttgagacggagtcttgctctgttgccaggctgtgagatctttctttctttctttctttttttttttgagacggagtcttgctct

SEQ ID NO: 3694 - DNA, 89 bp, homo sapiens
cctcccaagtatgatgtagtttcgcaatactaggaatatttgtgctgtatacactttcaccccactcctcccaagtaggatgtagtttc

SEQ ID NO: 3695 - DNA, 183 bp, homo sapiens
tctttagtggaaaatctgttaaaatgctgagaactagttttcagtcaagtcagtcagccaatggcttacgtctttagaggaaaatctgttaaaatgctgagaactagttttcagccaagtcgtcagccaatggcttacatctttagaggaaaatctgttaaaatgctgagaactagttttcag

SEQ ID NO: 3696 - DNA, 113 bp, homo sapiens
cccacctcggcctcccaaagtgctgggattacaggcgtgagcaactgcgtccggcccattttttcttttcacccacctcggcctcccaaagtgctgggattacaggcatgagc

SEQ ID NO: 3697 - DNA, 85 bp, homo sapiens
tttattttaagatggagttttgctcttgtcgcccatttcattttattttattttatttattttgagatggagttttgctcttgtc

SEQ ID NO: 3698 - DNA, 84 bp, homo sapiens
tttgagacggagtcttactctgttgccaggctgtgagatctttctttctttctttctttctttgagacggagtcttgctctgtt

SEQ ID NO: 3699 - DNA, 101 bp, homo sapiens
ttctcactggggctgatagtctaggacagtgtggcagggacttgctgcagctgagggcctctgttttcttgttgtgttctcactggggctgatggtctagg

SEQ ID NO: 3700 - DNA, 83 bp, homo sapiens
ttgaagtaactgttctgatgtgggtattgtttactgtatttcaagtacagttagttgaagtaactgttctgatgtaggtattg

SEQ ID NO: 3701 - DNA, 100 bp, homo sapiens
gggaaaaagatggtgatactactctccatattgtggggtaggttacatccccttgtgatataattcataatatcttgggaaaaagatggtgatattactc

SEQ ID NO: 3702 - DNA, 122 bp, homo sapiens
cataaatagtgaagatttcatggacatttattagttccccaaattaatacttttataatttcttacacctgtctttactgcaatctctgagcataaatagtgaagatttcatggacatttat

SEQ ID NO: 3703 - DNA, 94 bp, homo sapiens
ccaaaaaagaacctaattcagcttacagcatggtgtttttctttcaggaaaatatggagtttaaccaaaaaagaacctaattcagcttacagca

SEQ ID NO: 3704 - DNA, 115 bp, homo sapiens
tcatttgattctttgttcaaaatttcagcttttattttagatacagggagtactttcttagtgagtcctatatacactcatttgattctttgttcaaaatttcaacttttatttt

SEQ ID NO: 3705 - DNA, 91 bp, homo sapiens
tcttgtctttagataagctgatgactatttgcctaggtgacgatcttaagattctttcattcatcttgtctttagataacctgatgactat

SEQ ID NO: 3706 - DNA, 107 bp, homo sapiens
aataaagagttatatataaaacccaaagctactaaaaaaacctgaaaaacaacctagaaaagttaactcaagatggaataaagagttatatataaaacctaaagcta

SEQ ID NO: 3707 - DNA, 133 bp, homo sapiens
gggaccagcctttatctctgttctggtgataatcagttttgtgcttttagcctgggaccagtctttatctctgttctatgagtaatttggtctcctgtgcttgcggccttgggccagcctgtatccctgtctc

SEQ ID NO: 3708 - DNA, 134 bp, homo sapiens
ttaaaataaataaataaacatttattggcattaaaatatatcttttacctttacagaatttaaggggcaagggaatctttctatttttattgttaaaataaataaataaacatttattggcattaaaatatatc

SEQ ID NO: 3709 - DNA, 75 bp, homo sapiens
ttctaatacttaatgactccatggcccattagggttggtggcctaggcccattctactacttaatgactccatgg

SEQ ID NO: 3710 - DNA, 90 bp, homo sapiens
tccttaaagcaatgaaggaatatcaactatgaagaagtatcaactatgaaggaatattgctttaactccttaaagcaatgaaggaatatc

SEQ ID NO: 3711 - DNA, 87 bp, homo sapiens
catgtctctaccctcttttctctccactttccttgggggcaaacaccccccacccctcctcttcatgtctctaccctcttttttctc

SEQ ID NO: 3712 - DNA, 114 bp, homo sapiens
atgtcctgctgattggtccattttacagagcactgattggtccattttacagtgtgctgattcgtccattttaccaacctctagctagccacagagcactgattggtgcatttt

SEQ ID NO: 3713 - DNA, 77 bp, homo sapiens
taagtggtagagctgagcctccaacaaaactacccaaagactcaagagataataagtggtagagctgagcctcaaac

SEQ ID NO: 3714 - DNA, 111 bp, homo sapiens
tttaggttactttgcacaaatgaatcttttttttttttttttgagatggaataaggtacacacacacacacacgatatttaggttactttgcacagatgaatctttttttt

SEQ ID NO: 3715 - DNA, 104 bp, homo sapiens
ctcaccaacgcagcagcagaaacaacccctgcccaagaacccacaacggtccctggaccctgctgatcggaatagctgcactcacctacgcagcagcagaaaca

SEQ ID NO: 3716 - DNA, 140 bp, homo sapiens
tttttagtagagatggggtttcaccatgttggccaggatggtcttgatctcctgatctcatgatctgcgtgccaccacgcccagctaatttttgtgtttttagtagagatggggttttaccatgttggccaggatggtct

SEQ ID NO: 3717 - DNA, 101 bp, homo sapiens
acaaaagtcatctgtggatggacacttaggttgattatactacaagactacagtaactgagacagcatggtactggtacaaaagtcatctgttgatggaca

SEQ ID NO: 3718 - DNA, 123 bp, homo sapiens
ctgaatactttgttttgatattttattaaaatcttatcagtttattatgactattaaactaagatatttgtgtgaagctgaatactttgttttgatattttattaaaatcttatcagtttatt

SEQ ID NO: 3719 - DNA, 65 bp, homo sapiens
cacatatgaatgagaacatgcggtttctatatgtagtttccacatatgaatgtgaacatgcggtt

SEQ ID NO: 3720 - DNA, 100 bp, homo sapiens
caatcctgtaaatgattctctttcagtaagaaacttgaacacgcgttaggagatggaaggagatggattaaataggacaatcctgtaaattattctcttt

SEQ ID NO: 3721 - DNA, 117 bp, homo sapiens
ttagccactgtaatccagaaaaatggtaccactatgtataaaaataagcagttacttaagcaataatattttaaaacttattagccactgtaatccagaaaaatggtacccctatgt

SEQ ID NO: 3722 - DNA, 107 bp, homo sapiens
ttatatgcctttttatgtgcaataaagttgcacatagatatgcaagaaagttgatttctggcatatctatttttttcctgatttatatgcctttttatgtgcaataa

SEQ ID NO: 3723 - DNA, 133 bp, homo sapiens
tttcatagaatttaaaaacaaactaaatgtacacctagaatggttttgtttggccaagatacgtcatatttcttcaagaagtttgccaatatatttcattagaatttaaaaacaaactaaatgtacacctaga

SEQ ID NO: 3724 - DNA, 149 bp, homo sapiens
aaaagttctccacgtccccactagattagctagatacagagtgttgacacaaaggttctccaagtccccaccagagtagctagagagtgtcgattggtgcatttacaatcccttagctagacataaatgttctccaagtccccaccaga

SEQ ID NO: 3725 - DNA, 134 bp, homo sapiens
gggaggctgaggcaggagaattgcttgaaccgggaggaagaggttgcagtgagctgagattgtgccactgcactacaggttgggcaacaagagctaagggaggctgaggcaggagaattgcttgaacctggagg

SEQ ID NO: 3726 - DNA, 89 bp, homo sapiens
atcaatccacagtgataaacaataggaaagaaaggaagaaacaaaagatatataaaacaatcaatccacagtgataaacaataggaaag

SEQ ID NO: 3727 - DNA, 120 bp, homo sapiens
atcttcaagttctgaattaacattgcaggttgtgtgtgtgtgtgtgtgtgtgtgtgtgtgtgtgtgttttaattacatggcctctaaatgatcttcaattctgaattaacattgcaggtt

SEQ ID NO: 3728 - DNA, 106 bp, homo sapiens
aataactccaaaataataactctaaaaaaaacctcttttatttaaagatttaatatttattttaacttattaaaatattattattaaaataataactctaaaataa

SEQ ID NO: 3729 - DNA, 73 bp, homo sapiens
ggagacttagatgtaagatagaagaagaaaggctccttgagaagcttaaggagacttagatgtaagatagagg

SEQ ID NO: 3730 - DNA, 128 bp, homo sapiens
caaaaatgttattatttactatattccaatttttttaagtactgtgtatacaaaacataaaacaagttctctgttcttagatacaaaaatgttattatttactatattccaatttttttaagtactgt

SEQ ID NO: 3731 - DNA, 96 bp, homo sapiens
tagctcctctctgcagctggtcatcctgacatctgcttagctctcagcagagaggagaccctggagtggttagctcctctctgcagctgttcatcc

SEQ ID NO: 3732 - DNA, 89 bp, homo sapiens
gatttcagaattttttggacttttggtatatttggtatatttggtatattttggtatatttggtatattttttggacttttggtatatt

SEQ ID NO: 3733 - DNA, 93 bp, homo sapiens
aaaaatgttgttagtagtttcattttgcacttgtatacaagaacttaaagtaaaatttaaaaaaagaaaaaaaaatgttgttagtagtttgat

SEQ ID NO: 3734 - DNA, 93 bp, homo sapiens
atttagttaaacctgctctttttacttaggacagatgcctgtttctctttaactaagttacatgcagtcatttagttaaacctgctcatttta

SEQ ID NO: 3735 - DNA, 82 bp, homo sapiens
acaaaggccagccaaattctttattccaagtgtttagagctgaactcctagcaaccagtacaaaggccaaccaaattcttta

SEQ ID NO: 3736 - DNA, 81 bp, homo sapiens
gctgcatctggtggcaggctttatagtggcaagtgagttgatgtacttcaactgtacggctgcatctggtggcaggcttta

SEQ ID NO: 3737 - DNA, 85 bp, homo sapiens
agataggatagtattctgggaattaaaggttaaacctatgaagatttcagtaggtaatcaagataggttagtattctgggaatta

SEQ ID NO: 3738 - DNA, 92 bp, homo sapiens
agccctttatttctttctcttgtctgagaacagtaagattttgacttcctcttttccaatttggaagccctttatttctttctcttgtctga

SEQ ID NO: 3739 - DNA, 74 bp, homo sapiens
tctggtggggacttggagaaccttcgtgtccacactctgtatctagctaatctggtggggactgtggagaacct

SEQ ID NO: 3740 - DNA, 106 bp, homo sapiens
tcagcagggtccaggggccattgcagtttcttgggcaagaggtgtttctgctgctgcattagtgagcacaactattccgatcagcagggtccagggaccattgcag

SEQ ID NO: 3741 - DNA, 103 bp, homo sapiens
agaagcaaacaccatatatatatataggtttctatatgtgtgtgtgtgtatatatatatatatagagagagagagagagaagcaaacaccatatatatatata

SEQ ID NO: 3742 - DNA, 99 bp, homo sapiens
aggtaatgttacagaaagtaattgcatgttatttgtaatattttgataattcctctgatgtttagatagtaaaataaggtaatgttatagaaagtaatt

SEQ ID NO: 3743 - DNA, 86 bp, homo sapiens
tgcagtaacatggatggaactggaggttattatgaaataataatcatcatcatcatctgcagtaacatggatggaactggaggtta

SEQ ID NO: 3744 - DNA, 77 bp, homo sapiens
cagagagtctcacctgggtttggaggacagcagcagggaaaccttctcaaaggacagaaagtctcacctgggtttgg

SEQ ID NO: 3745 - DNA, 114 bp, homo sapiens
gagaatgcattggtaagggccactaaatccgatttttcttggtcctctttgtggtctaggaggacaggcaagggtgcagattttcgagaatgcattggtaaggaccactaaatc

SEQ ID NO: 3746 - DNA, 106 bp, homo sapiens
ccccaaagtttgaggagaatgtgctatcctgccctttatcaaggaggtaaagtggaggaagaacgcttaccccaaagtttgaggagaatgcgctatcctgcccttt

SEQ ID NO: 3747 - DNA, 105 bp, homo sapiens
gctgcctaaggcaacagtagtggcaacatcccctcccgactcatcagcctttccacctctgtctgggaagatgaaccctgtgctgcctaaggcaacagtggtggc

SEQ ID NO: 3748 - DNA, 175 bp, homo sapiens
gctaatggaatatatatatatatacacatatatatatatacatatatatatatatatacacatatatatatgtatatatatatatgtgtatatatatatatatatgtgtgtatatatatatatatatatatatggagagagagagagagaggcacagaactgtatatatatatat

SEQ ID NO: 3749 - DNA, 139 bp, homo sapiens
aaaaaactctatgaagtacattggcacatgacatatatatacatacactcttgtcattcctcatgacatttctgacaacttcccttaggcataaaaaactctatgaagtatattggcacatgacatatatatacataca

SEQ ID NO: 3750 - DNA, 127 bp, homo sapiens
aacatatgcctacgagaaagagatagaaaagtgaaacatgtatgtgagattcccactcctgattcacttctttggccaaaatgcatgtttgaacatatgtctacgagaaagagatagaaaagtgaaa

SEQ ID NO: 3751 - DNA, 205 bp, homo sapiens
aatgagttagaaaaccttccaatatgttattgtttattatcatgccagcttcgtgcatgaaactttcaatgagttagaaaaccttccaatatgttaagtgttaacaattatgtacacttgtcatggatttcattaaaggtacttgacactaacaactctccatttaacaaaaaaaggtagtgttaacaattatgtacagttgtca

SEQ ID NO: 3752 - DNA, 85 bp, homo sapiens
ataaacatgaacaccaaaagataactgttaatgtgtggaattaactgattttcatttttatataaacaggaacaccaaaagataa

SEQ ID NO: 3753 - DNA, 125 bp, homo sapiens
ataaatgtacatgaaatcttcacaatttatgttcagagattgcagtaaagacaggcataagaaattaaagaagtattaatttggggaactaataaatgtccatgaaatcttcacaatttatgttc

SEQ ID NO: 3754 - DNA, 104 bp, homo sapiens
tagctgggattacaggcatgcaccaccacacccaactactttttgtaatttttgtagttgttattttagctgggattacaggcatgcaccaccatacccaacta

SEQ ID NO: 3755 - DNA, 94 bp, homo sapiens
tagttaaaagtactgcgtgtttactttgcgtaaaccaaactaattaacaggacataatttgttctctagttaaaagtactgtgtgtttactttg

SEQ ID NO: 3756 - DNA, 181 bp, homo sapiens
agatatttctcttcaactctataattcaggggtccctcagtaagcattttcacaatctaacttaatagatatttctcttcaactctgtaattcaggggtccctagaagacaggaagatgtgagaaagtgtggaacttcctagatactggaaggttcagaagacaggaagatgtgggaaagt

SEQ ID NO: 3757 - DNA, 78 bp, homo sapiens
agaagacaggaagatgtgagaaagtgtggaacttcctagatactggaaggttcagaagacaggaagatgtgggaaagt

SEQ ID NO: 3758 - DNA, 72 bp, homo sapiens
tattgataagtaaggacttacttattattattgatacattcagtgttactattgataagtaaggacttactc

SEQ ID NO: 3759 - DNA, 153 bp, homo sapiens
atatttttataaaatatattattttatttttaaaatatattattttatattattaaattatatatcagataaaattatattattaaaaatactataaacagatatctgttaagcagataaaatatattacataacagataaaattatattatt

SEQ ID NO: 3760 - DNA, 129 bp, homo sapiens
ggacctaagtttcacccaagtcattgggagttaattatatgggtgtaaaaggttaaaggccatcttaaaattcttgctagcagctctcctggggacctaagtttcacccaagtcactgggagttaatta

SEQ ID NO: 3761 - DNA, 73 bp, homo sapiens
tcattcttttattcaaaatatatcagcattatttgtgacacatgttacagtcactcttttattcaaaatatat

SEQ ID NO: 3762 - DNA, 100 bp, homo sapiens
agaaaactttctgcaatgatggaactgtgttccatcaacatgtgtttattgaacgtctaatacaggtctgtccaagaaaactttctgcaatgatggaact

SEQ ID NO: 3763 - DNA, 89 bp, homo sapiens
tagattgattttcaacaagagtgccaagacctatggaagtaaatccatacttgtatggtagattgattttcaacaagagtgccaagacc

SEQ ID NO: 3764 - DNA, 93 bp, homo sapiens
tctatctagaggattgtaaatgcaccaatcagcactctgtaaaaatgcaccaatcagtgctctgtatctagctaaaagattgtaaatacacca

SEQ ID NO: 3765 - DNA, 93 bp, homo sapiens; identical to SEQ ID NO: 3764

SEQ ID NO: 3766 - DNA, 164 bp, homo sapiens
ataagggtctaacaaagatcacatgcttctgagggaacaggacaaaaggcaaaagcagaactactgataagggtccaacaaagatcacaaatgtcatcagttaaggcaagaacagaccattttcacttcttttgtggtggaatgtcatcagttaaggcaggaac

SEQ ID NO: 3767 - DNA, 79 bp, homo sapiens
ctctaaattcatgctcataactgccgtctgtggcctcataactgctgtctgttgcctctgaattcatgctcataactgc

SEQ ID NO: 3768 - DNA, 109 bp, homo sapiens
aatggtcttggcattcatcaacaattatttgacaaaatatgcaagggcttatttctccttttcccatgcaatggtcttggcattcatcaacaattatttgacaacatat

SEQ ID NO: 3769 - DNA, 78 bp, homo sapiens
tgggaaagtttgaaacttcctagagacttggagggctcagaagacaggaagatgtgggaaagtttggaacttcctaga

SEQ ID NO: 3770 - DNA, 164 bp, homo sapiens
ttcactaagtagtagtagtagcagcagcagcagcagcagcagcagtagtagtagtagtagtggtggtggtagtagtactagaagatagtagtagtagtagcagtagtagtagtagtagaagatagtagtggtagtagtagtagtagtagtagtagtagtagtag

SEQ ID NO: 3771 - DNA, 95 bp, homo sapiens
gcactccatctcaaaaaaataaaataaaatgaaacaaaatacaaaaaattagctgggtgtggtggtgcactccatctcaaaaaataaaataaaac

SEQ ID NO: 3772 - DNA, 85 bp, homo sapiens
ggtcttggtttaatctatattggactttttaactattttagctgtgagagaaggtccatggtcttggtttaatctatgttggact

SEQ ID NO: 3773 - DNA, 83 bp, homo sapiens
taattgaagaaatacttattcaggatttctattacttagttttgctcaatatattcactaattgaagaaatatttattcagga

SEQ ID NO: 3774 - DNA, 121 bp, homo sapiens
caaatccagcagggcagtcaaatctcaaagctccaaatgtgaaaatttggccaaaataaagggactacaggccccatgcaagtacaaatccagcagggcagtcaaatctcaaagctccaaa

SEQ ID NO: 3775 - DNA, 95 bp, homo sapiens
ttataaacatacatatatgtgagatatattgagatatatagaaattatgtttatacatacatctattataaacatacatatatgtgagatatatt

SEQ ID NO: 3776 - DNA, 63 bp, homo sapiens
atataatagaacatgatatactattatatatataattatatataattatatataatagaacat

SEQ ID NO: 3777 - DNA, 80 bp, homo sapiens
tgtgaaacatgaagtcaaaggagaaattcaagccacttgcatcagtgtgatctggctgtgagacatgaagtcaaaggaga

SEQ ID NO: 3778 - DNA, 128 bp, homo sapiens
gcatcattgcaagggtggtgacacagtggcccagcacggatttgagaaactaagcagactgtggagggcatccatagggccaagcaagggaggcatcagtgcaagggtggtgacacagtggcccagca

SEQ ID NO: 3779 - DNA, 188 bp, homo sapiens
catgaaaggtttactaagcattcctaagtgttaagtcttcactatccctgaaaagcattttcaaacataaccaataattttactaaggtttactaagcattcctaagtgttaagtttactaaggtttactaagtatgagagtatgaaacactcttactaagtttactaagcattcctaagtgttaagt

SEQ ID NO: 3780 - DNA, 79 bp, homo sapiens
tgtcccacagtcttattctgttctgatgtttgttttgtttttagttgtttgtgttgtcccacagtcttattctgttctg

SEQ ID NO: 3781 - DNA, 106 bp, homo sapiens
atttaattttagggaactgctttcagaaagctgtttttcaaactaccaaaaagataccagatatatcttcccaagttcaaatatttaattttagggaactactttc

SEQ ID NO: 3782 - DNA, 92 bp, homo sapiens
acattatttactttagttgatacagctgaatacttgtatttttatattaacatgtgaacttcaaagtaacattatttactttagttgatata

SEQ ID NO: 3783 - DNA, 94 bp, homo sapiens
aggaacccaactttgtattttttactagtagcaatgggtcagtattcgctaattcagtgtttgcagcatacaggaacccaactttgtgtttttt

SEQ ID NO: 3784 - DNA, 86 bp, homo sapiens
atgctttcagtctctctgaattcccttgtgggcttcttcagcattggtagatgaatcttatgctttcaatctctctgaattccctt

SEQ ID NO: 3785 - DNA, 125 bp, homo sapiens
gaacataaattgtgaagatttcatggacatttattagttccccaaattaatacttttataatttcttacgcctgtctttactgcaatctctgaacataaattgtgaagatttcatggacacttat

SEQ ID NO: 3786 - DNA, 113 bp, homo sapiens
tgctggccttaccagctgaaagaaaactgtgatacagtgctggagggttgatataatcctgatgtaggacagtgaaggtgtattgctggccttaccagctgaaagcaaactgt

SEQ ID NO: 3787 - DNA, 120 bp, homo sapiens
tatatacatatataaaatgttttatatatatataacattttctttatccatatatctatatatctatatgtgtgtgcgtgtatacatacatatatatatatataacattttctttatcca

SEQ ID NO: 3788 - DNA, 121 bp, homo sapiens
attctatttgtgcttatttaatccaagtttatccttgtaaccatgtgtaagtgaagatttatcaaacaatattgaaaagcatgcttattaattctatttgtgcttatttcatccaagttta

SEQ ID NO: 3789 - DNA, 108 bp, homo sapiens; identical to SEQ ID NO: 2484

SEQ ID NO: 3790 - DNA, 93 bp, homo sapiens
aaggaaatctatagtttcttatttcattctttaatgatgacattcaagaaaagggaaagataaggaaatctatagtttcttatttcattcttt

SEQ ID NO: 3791 - DNA, 106 bp, homo sapiens
tgaccaggccatcccagcatctagaccaggccatcccagcatctaaatacaacatggtatctagttcataagcctggcctatgaccaggccatcccagcatctaga

SEQ ID NO: 3792 - DNA, 144 bp, homo sapiens
tggggggttcttgccacccagaaaagcagagaaggggtagagacacggagagtaggggctgggggattcttgccccccagaaaagtggtacttgccactaagggtgaagtagaaggggttgggggttcttgccccccagaaaag

SEQ ID NO: 3793 - DNA, 80 bp, homo sapiens
aaagtttggaacttcccagagacttggagggctcagaagacaggaagatgtggaaaagtttggaatttcccagagacttg

SEQ ID NO: 3794 - DNA, 99 bp, homo sapiens
ggtgcatttttacagagtgctgatagtgctaattggtgtgtttacaatcctttagctagacacagagtgctgatcggtgcatttttacagagtgctgat

SEQ ID NO: 3795 - DNA, 115 bp, homo sapiens
gttaaaaagaggtgagagatctccattcaggagggggttgaaactcagaaagaggtgagaaatccccatggggggcggggtgttgaacctcagaaagaggtgagaaatccccatg

SEQ ID NO: 3796 - DNA, 90 bp, homo sapiens
gaattgtaatccccataatccccacgtgtcaaggtagatcaggtggatgtgattggatcatggggggaattgtaatccccataatcccca

SEQ ID NO: 3797 - DNA, 81 bp, homo sapiens
agaagacagaaatatgtgggaaagtttagaatttcctagagacttggaggagtcagaagacaggaatatgtgggaaagttt

SEQ ID NO: 3798 - DNA, 95 bp, homo sapiens
taagacattaaactattaaacaaactatttatagttaatgtctatttatagttaatttatgtttaatgtcttaagacattaaactattaaagaaa

SEQ ID NO: 3799 - DNA, 114 bp, homo sapiens
tctcatgatactgaacaagactatcaaggaataataggggcaaaaaagtagattaaaaaatacatatagttatttaatctcatgacactgaacaagactatcaaggaataatag

SEQ ID NO: 3800 - DNA, 125 bp, homo sapiens
gaacataaattgtgaagatttcatggacatttattagttccccaaattagtacttttataatttcttacacctgtctttactgcagtctctgaacataaattgtgaagatttcatggacacttat

SEQ ID NO: 3801 - DNA, 114 bp, homo sapiens
ctgtaaacatttttagataaatggaaaaagaaaaaagtcctatgatatgggccctgaaattaaagcaaatgatggagatcggtactgtaaacatttttagataaatgaaaaagg

SEQ ID NO: 3802 - DNA, 91 bp, homo sapiens
tcttgtcttcaatattcttatgtgtaaaaagataagtccattatatctatattatttcatcttgtcttcaatattcttatgtataaaaaga

SEQ ID NO: 3803 - DNA, 79 bp, homo sapiens
caagtctctaggaagttctaaactttcccacatcttcctgtcttctgagccatccaagtctctaggaagttctaaactt

SEQ ID NO: 3804 - DNA, 97 bp, homo sapiens
cataaaaagcatcattatgaattaattattacaatgatacaaatttatttttaggcagatttattgagaagaccataaaaagcatcattatgaatta

SEQ ID NO: 3805 - DNA, 101 bp, homo sapiens
aaaaatcaggtttagatagtttcattcattcaggagatcatttaagtatcatttattacttatttctaactttaaaaagcaggtttagatagtttcattca

SEQ ID NO: 3806 - DNA, 91 bp, homo sapiens
tttgtttcactggttgcaatatacagtaacaagtaatataagtccactttccagtaagtctttttgtttcactggttgcaatatacggtaa

SEQ ID NO: 3807 - DNA, 186 bp, homo sapiens
agctagatacagagtgtcgactggtgcactcacaaaccttgagctaaacacagggtgctgattggtgtgtttacaaaccttgagctagatacagagtgccgattggtgtatttacaatccctgagctagacataaaggttctccaaggccccaccagagcagctagatacagagtgtcgattggtg

SEQ ID NO: 3808 - DNA, 115 bp, homo sapiens
ctgacctttgagtgagattagtctctatgctccccttagagcatagaaaatacttttccccatagaaaagtcttaaacactgacctttgagtgagattggtctctatgctcccct

SEQ ID NO: 3809 - DNA, 81 bp, homo sapiens
agaaagggtagctcctctttgcaggcaggtcgtcctaacaagtgttcagctcccaggagaaagggtagctcctctctgcag

SEQ ID NO: 3810 - DNA, 91 bp, homo sapiens
taaacagacatggagcttttaaattaaagttgtttatttgaagtctgtttatttgaagctaaacagacatggagcttttaaattaaagttg

SEQ ID NO: 3811 - DNA, 99 bp, homo sapiens
ttttaatttatatactatgcatttatatgcatagtatataataaatgtattaaataaatttattgtgtactatgccttttatttatatactatgcattt

SEQ ID NO: 3812 - DNA, 90 bp, homo sapiens
gtaactatagtattgataaggaactgtagtactgataagaacaatgtaactatacatttgtataatgtaactatagtattgataaggaac

SEQ ID NO: 3813 - DNA, 80 bp, homo sapiens
atgtgggaaagtttggaacttcctagagacttggagtactcagaaggcaggaagatgtgagaaagtttggaacttcctag

SEQ ID NO: 3814 - DNA, 110 bp, homo sapiens
aggatggccacaggttagttagtgagattctatgtatgcatgagtagaaacatagatgcattacatatatttttgcagataggatggccacagattagttagtgagattc

SEQ ID NO: 3815 - DNA, 139 bp, homo sapiens
agaaggccatgctaaggagtgtgaattttaggctatgacaaataggttttttagatgactctgcaattacatgttcaattcattcaaattacagaaggccatgctaaggagtgtgaattttaggctacgacaaataggt

SEQ ID NO: 3816 - DNA, 98 bp, homo sapiens
gagttataaaatacacttatctaggtgtctttatctaggagttataaaatactagtatacatacacttatctaggagtataaaatacacttatctagg

SEQ ID NO: 3817 - DNA, 109 bp, homo sapiens
cctccaggcacaggtggggcatctggaggcccagccacacagctcagaaaaagagttagaagctgccatgaatgggaacctccaggcacaggtggggcacctggaggcc

SEQ ID NO: 3818 - DNA, 103 bp, homo sapiens
agctgtgtagccaggccttcaggcatcccacctgtgcctggaggtccccattcacagcagcttctaactctttttctgagctgtgtagccaggcctccaggca

SEQ ID NO: 3819 - DNA, 85 bp, homo sapiens
ttgattttcctttttatttaagccagttgagttggaatttatattacatgacgttgaaagttgattttcctttttatttaagcca

SEQ ID NO: 3820 - DNA, 95 bp, homo sapiens
tatatacatggacccttaagtatatacatggacccctaagtatataatatatatacatgtataatatacatgtatatatatccataagtataata

SEQ ID NO: 3821 - DNA, 167 bp, homo sapiens
aatacaccaatcagcactctgtatctagctcaaggtttgtaaacacaccaatcagcaccctgtgtccagcaaacacaccaatcagcaccctgtgtctagcgaacacaccaatcagcaccctgtgtctagctcagggtttgtgaatgcaccaatcgacactctgtatc

SEQ ID NO: 3822 - DNA, 198 bp, homo sapiens
acggggtggtggctgggcaggggggctcctcacttcccagtaggggaggccgggcagaggcgcccctcacctcccggaccgggcggctggccgggtgggggctgacccccccacctccctcccggccggggcggctggccgggcggggggctgacccccccacctccctccctgacggggcggctggcctggcggggg

SEQ ID NO: 3823 - DNA, 98 bp, homo sapiens
cccccccaaattcttttaatctgcagaaaagtcatctgtgcatgttcagaacagatacaaccaactttttttcccccccaaattcttttaatccgcag

SEQ ID NO: 3824 - DNA, 111 bp, homo sapiens
caatctagcaagtttttaaaagttaaacaaacatacacctaaactaaatgtacaataactttaataaaacaatctagcaagtttttaaaagttaaacaacatacacctaac

SEQ ID NO: 3825 - DNA, 103 bp, homo sapiens
tacatatttgggactcaccagactactgatcttacatacatacgccagactactgatcttacatatgcttatcttacatatttgggactcactagactactga

SEQ ID NO: 3826 - DNA, 110 bp, homo sapiens
aaaactgcaggataaagaatgaaggcctgctcccacactggcaatgaatcaacattcagagtaaggtttttcaataaaactgcaggataaagaatgaagacctgctccca

SEQ ID NO: 3827 - DNA, 103 bp, homo sapiens
aaaggttttccaagtccccaccagagtagctagatacagagtgtcgattggtgtatttacaatcccttagctagatataaaggttctccaagtccccaccaga

SEQ ID NO: 3828 - DNA, 100 bp, homo sapiens
aattccctgaggaataattaaaactcatcttaaacaggtctaaaacaggagaacatagatgtgctttctatgtaataaattccctgaggaattattaaaa

SEQ ID NO: 3829 - DNA, 103 bp, homo sapiens
tggagctgaaatgtgtcttgtgcatagtggctctcatagtggctctcaacatgtttatcagaacacgtggagctgaaatgtgtcttgtgcatagtggctctca

SEQ ID NO: 3830 - DNA, 94 bp, homo sapiens
gtcattccatagcctccttgatttctgatgtggacttaatctttatgtttgagctcaattgtcattccgtagcctccttgatttctgatgtgga

SEQ ID NO: 3831 - DNA, 105 bp, homo sapiens
ggggttcggaggaggcaacacttctaccaggttccaacagatgcacaccatgggtcctgtagaaagctgaatcctctccgggggttcagaggaggcaacacttct

SEQ ID NO: 3832 - DNA, 110 bp, homo sapiens
catataattattttattgagataatcaaaaatatctaatttgaaagcaaaatgaagatatttgaaataatttggttaacttatcacatataattattttattgaggtaat

SEQ ID NO: 3833 - DNA, 93 bp, homo sapiens
ttcaaacaatcctgcctgagcctcccaaaatgctgggttttgctttcctgacaccggtatctcctggttcaaataatcctgcctgagcctccc

SEQ ID NO: 3834 - DNA, 120 bp, homo sapiens
tgattttttaaaactataatatcaatagcattcttgtttttctaagagatcatattttaggtacattttatatactgattttttaaaactataatatcaatagcattttgtttttctaaa

SEQ ID NO: 3835 - DNA, 107 bp, homo sapiens
atccaaaaaattttttccttgttccaaaaaatgtttgaggtgatagctatgataattatcctgatttgatcataaaacatttcatccaaaaaatttttttcttgttc

SEQ ID NO: 3836 - DNA, 113 bp, homo sapiens
taaataaggaatattgcttataaatattcacaaataaggaatatttatatataaataagggtttatatacaaataaattagagttataaaaaaggaatattgcttataaatat

SEQ ID NO: 3837 - DNA, 73 bp, homo sapiens
atatattattgccccactaagaaataaaatatatataaatattattatttatttattattgccccactaagaa

SEQ ID NO: 3838 - DNA, 79 bp, homo sapiens
aagatgtgggaaagtctggaacttcttagagactcagagggctcagaagacagaaagatgtgggaaagtttggaacttc

SEQ ID NO: 3839 - DNA, 77 bp, homo sapiens
aactttcccatatcttcctgtctcctgagccttccaagtcactaggaagttctaaactttcccatattttcctgtct

SEQ ID NO: 3840 - DNA, 88 bp, homo sapiens
cctaatttctcatgccacaagattgcaccaaatatgcatattcacacatacatacatttggttgcctaatttctcatgtcacaagatt

SEQ ID NO: 3841 - DNA, 84 bp, homo sapiens
gacatttattaatagaatatgaaataatgagggtcgattgtgaaggacatggaggacagcgacatttattaatagaatatgaaa

SEQ ID NO: 3842 - DNA, 118 bp, homo sapiens
actttaaatcatctctagattatttataatacctagtacaatgtaaatgctatttaccctatactgtgcatcctcctatagactttaaatcatctctagattacttataatacctagt

SEQ ID NO: 3843 - DNA, 95 bp, homo sapiens
atgcaaccaatataatcccctatgttgttctataattaaaatgaatgaaattctagaaattccactatgtatatgcaaccaatattatcccctat

SEQ ID NO: 3844 - DNA, 99 bp, homo sapiens
aatgcgccaatcagcaccctgtcaaaaacggaccaatcagctctctgtaaaatgggccaatcggctctctgtaaaatggaccaatcagcaggttgtggg

SEQ ID NO: 3845 - DNA, 89 bp, homo sapiens
atataaacttaaagtgacataaacgtgctagttaacatctaattaatttctaagaatttaatgccatgtaaacttaaagtgacataaac

SEQ ID NO: 3846 - DNA, 77 bp, homo sapiens
ccacagtctattcattagaaaggactcaccaaatgacacactgtcacttctgccacagtctattcattagaaaggac

SEQ ID NO: 3847 - DNA, 96 bp, homo sapiens
tgccattgcactccagcccaggcaacgagagtgaaactctgtttcaaaataaataagtaaataaatgccattgcactccagcccaggcaacaagag

SEQ ID NO: 3848 - DNA, 110 bp, homo sapiens
tactccaagattatccttaataaatattgcatagctctatctgttgcatatcttggagtagggtaagcaatatgcataccctactccaagattatcctaataaatattgt

SEQ ID NO: 3849 - DNA, 135 bp, homo sapiens
gccctcagatttgttttgtatgagcagcaggttttttcattgtgtttttgtttttgtttttttcaatgaattcactgccagtcttcaaaactctgccctcagatttgttttgtatgagcagcaggttttctcatt

SEQ ID NO: 3850 - DNA, 71 bp, homo sapiens
tacgcattcaaatcagcgtacttgattcaaactacttgattgaaactacgcattcaaatcagagtacgcat

SEQ ID NO: 3851 - DNA, 66 bp, homo sapiens
aagtgtcaacacctttctcttcagtgtcaacacccataaaaaaagtgtcaacacctttctcttaag

SEQ ID NO: 3852 - DNA, 87 bp, homo sapiens
agtatagtaccaaaccttctatatactacgtttttttctatttctatgtttttttttctagtatagtaccaaaccttctatatacta

SEQ ID NO: 3853 - DNA, 75 bp, homo sapiens
attcttctgcctcagcttcccgagtagctggaactacagacgtgtaccgcaattcttctgcctcagcttccagag

SEQ ID NO: 3854 - DNA, 136 bp, homo sapiens
ccctgaaaattcagagactagggttaaggataatttggtagatagggggccagggagtcaggagtgctgattgatttactatcactcaaatcagtctccctgaaaattcagagactggggttaaggataatttggt

SEQ ID NO: 3855 - DNA, 110 bp, homo sapiens
aaaacacagaacatcttgaggcaaggggagaaatatatattcatatatctcttttcttctcaagaagtaatgtagtatatatataaaacacaggacatcttgaggcaagg

SEQ ID NO: 3856 - DNA, 108 bp, homo sapiens
aaaaaaggataaaataaaagaaacaaaagcccaggtggtaaattttccagtcttcttggagaagtaacacagaaaaaaaggtaaaataaaagaaacaaaagcccaggt

SEQ ID NO: 3857 - DNA, 112 bp, homo sapiens
cccaggctggagtacagtggcgcgatctttttttttttttttttttttttttttttttttttgagacggagtctccctctgtcacccaggctggagtgcagtggcgcgatct

SEQ ID NO: 3858 - DNA, 107 bp, homo sapiens
ttgaatgattgctgaattcacacttattggagatttaaaatgctgtagacagacacaaaggcaaataataagtaccgtttgttgagtgattgctgaattcacactta

SEQ ID NO: 3859 - DNA, 144 bp, homo sapiens
gaagtactgaaacagctccagggtgtacttccagaccctcttctcagcagttactacaccaatcccacccacccagggtgatgtcaacggaagtactgaaacagctccagggtgtacttccagatcctcttctcagcagttact

SEQ ID NO: 3860 - DNA, 110 bp, homo sapiens
aaatatattattcaaatgactttcacttgtttatgttgattataagttgaaataaaatttttggatatattcaattaaataaaatacattattcaaatgactttcacttg

SEQ ID NO: 3861 - DNA, 137 bp, homo sapiens
ggtacaacccctttaggagacaaaacattcattcagtgacaaattgattacaaattgagacctgttcatattgagccctcaatatggtacaacccctttaggagacaaaacattcattcagtgacaaattgattaca

SEQ ID NO: 3862 - DNA, 88 bp, homo sapiens
aaaacttcagtggcatacaataaacacaaattacatttaaaaaacaataacaacaaaaaccccacaaaacttcagtggcatacaacaa

SEQ ID NO: 3863 - DNA, 95 bp, homo sapiens
gatcctggatcactgagccatgatgatgtcaggattttgacatcatcatgtcatcacctgcttcaggtgatcctggatcattgagccatgatgat

SEQ ID NO: 3864 - DNA, 83 bp, homo sapiens
tttattaagttcaagtgaacttagtaagatttaggtttaaactgaggtttaaagagacagtttattaagttcaagtaaactta

SEQ ID NO: 3865 - DNA, 95 bp, homo sapiens
gattggctggcctgtggccaggctgtgaaaagctctcattggctggcccatggccaggctgtgaagggttctgattggctggcctgtagccaggc

SEQ ID NO: 3866 - DNA, 116 bp, homo sapiens
ttttgatatttttgacaaactttccaaaccaagcctttgatattgataaaaatcaaacctttaacattgctattaatattgacaaacattttggtatttttgacaaactttccaaa

SEQ ID NO: 3867 - DNA, 108 bp, homo sapiens
taaacctcttttgtttataaattacccagtctcaggtagtgtctttatagcagtgtgaaaatggactaacacagtgagccaaaataaacctcttttctttataaatta

SEQ ID NO: 3868 - DNA, 104 bp, homo sapiens
gcaagacccccatctctaaaaacaataacaataataataataatttaaaaatttttaaatggggataacctgggcaatagcaagaaccccatctctaaaaacaa

SEQ ID NO: 3869 - DNA, 128 bp, homo sapiens
gaacataaattgtgaagatttcatggacatttatcagtccccaaaattaatacttttataatttattacacctgtctttactgcaatctctgaacataattgtgaagatttcatggacatttatcagt

SEQ ID NO: 3870 - DNA, 84 bp, homo sapiens
agaaagagctgatcccttcccttgtgaattttttttttttttgagatggaatttcagaaagagctgatcccttcccttgtgaat

SEQ ID NO: 3871 - DNA, 92 bp, homo sapiens
attcagattacaatggggaaattcatcaattcatcattgattcagataacaaatcaattcatcattgattcagattacaatggggaaattca

SEQ ID NO: 3872 - DNA, 74 bp, homo sapiens
gatgctaaatgtattaaacctttgagtttaatgatttgagtctcaaatgatgctaaaggtattaaacctttgat

SEQ ID NO: 3873 - DNA, 128 bp, homo sapiens
tagatgccattgcccttattgggccttgcctcaggagttcctctgtgtatctctggtccagattccggaggaaacctgtttgacttgagtagatgccattgcccttattgggccttgcctcaggagtt

SEQ ID NO: 3874 - DNA, 105 bp, homo sapiens
catgctgatttggttactaaagctttgtagtattattttgctcagcctgtgtgtccatttttataccaacatcatgctgatttggttactaaagctttgtagtat

SEQ ID NO: 3875 - DNA, 90 bp, homo sapiens
ctacaccagcagacgaccacacacatcgtggaacactagcagcacacagcgctccttaaacagcgctacaccagcagacgaccacacaca

SEQ ID NO: 3876 - DNA, 76 bp, homo sapiens
aaacatttattttattaaacacatatagtgtttaatttattttattaaaacatctattttattaaaacatttattt

SEQ ID NO: 3877 - DNA, 91 bp, homo sapiens
aagtgcagaaatgcttctgataaaacatatcgaacaagccttttatccagatgcacttcaaataggaagtgcagaaaggcttctgataaaa

SEQ ID NO: 3878 - DNA, 123 bp, homo sapiens
aaatgtccatgaaatcttcacaatttatgttcagagattgcagtaaagacaggtgtaagaaattataaaagtattaatttggggaactaataaatgtccatgaaatcttcacaacttatgttc

SEQ ID NO: 3879 - DNA, 102 bp, homo sapiens
ttggtccattttacaaacctctagctagctacagagcactgattggagcatttttacagagtactggttggtacattttacaaacctctagctagctacaga

SEQ ID NO: 3880 - DNA, 165 bp, homo sapiens
cggggtggctgccgggcagaggggctcctcgcttctcatatggggcggttgccaggcggagggttggtccattttacaaacctctagctagctacagagcactgattggagcatttttacagagtactggttggtacattttacaaacctctagctagctacaga

SEQ ID NO: 3881 - DNA, 146 bp, homo sapiens
atggcccaaaataaagcaatagttgttaacttctatgccatagactcactgcagaccgagggactcatttatgagtcccaaatatgggagttacaattatggcccaacataaagcaatagttgttaacttctatgccatagactca

SEQ ID NO: 3882 - DNA, 103 bp, homo sapiens
atttagaatttgggcagcttttggacctgtttggacctgtttatttctaaacatttaaggctaattcatttgttttccaatttagaatttggacagcttttgg

SEQ ID NO: 3883 - DNA, 100 bp, homo sapiens
aactagctttactgccttcaatttcttccagagcacattcattgctcatcgcttgactgtcacaacagtcttctaactagccttactgccttcaatttct

SEQ ID NO: 3884 - DNA, 103 bp, homo sapiens
gatcctcccacctctgcctcccaaagtgttgggattacaagcatgggagccacctgtaggtgggtgaggagcagtgatcctcccacctctgcctcccaaagtg

SEQ ID NO: 3885 - DNA, 113 bp, homo sapiens
aaatatacccaatatttatatattgggtatataccaatatatatatacccaatagtcactttatacccaatagtcactttatgatgacccaaatatacccaatagtcacttta

SEQ ID NO: 3886 - DNA, 134 bp, homo sapiens
ctactagttccctgactatacaactatgtatacaactatacacctgactatacaaggtgacagagctgggattagaggccttccctgatttcccttctactagttccctgactatacaactatgtatacaacta

SEQ ID NO: 3887 - DNA, 124 bp, homo sapiens
ttaataaaatggtcaaattcatatactctggaatggtgattatcaaaaaattatccattttatcaaaaaattaataaatttaataaaatggtcaaattcatatactctggaatggtgattatca

SEQ ID NO: 3888 - DNA, 92 bp, homo sapiens
aaccaacaggaaatataaggaatttgatggaaccaatcttatatttccaggaaatataagatagaaccaacagtaaatataaggaatttgat

SEQ ID NO: 3889 - DNA, 75 bp, homo sapiens
actctgattgaaatctgtatcattacaatctgtatctgattttctaactaactctgattaaaatctgtatcatta

SEQ ID NO: 3890 - DNA, 125 bp, homo sapiens
gaacataaattgtgaagatttcatggacatttattagttccccaaatcaatacttttataatttcttatgcctgtctttactgcagtccctgaacgtaaattgtgaagatttcatggacatttat

SEQ ID NO: 3891 - DNA, 75 bp, homo sapiens
atgggccctagtaatacggtgggccctagtttcatacataatttcatacaatgggccctagtaatacggtgggcc

SEQ ID NO: 3892 - DNA, 95 bp, homo sapiens
ctaagggattgaaacttcaaccaatcaatggggactttcccctaagccaaaatgagtcacagctataaactaagggattgaaacttcaaccaatc

SEQ ID NO: 3893 - DNA, 163 bp, homo sapiens
ccgcttttctggggaaggggcaagtaccccaacctcttctctccttttctctaccccttctctgctttcctggggcaggggcaagtaccccccaacccttttctccttcacccttagcggcaagtcctgctttcctggggcaggggcaagtacccctcaaccc

SEQ ID NO: 3894 - DNA, 81 bp, homo sapiens
aaagtttggaacttcctagagactcagagggctcagaagaaggcagaaagatgtgaaaaagtctggaacttcctagagact

SEQ ID NO: 3895 - DNA, 112 bp, homo sapiens
taattaaatatatatttatgaccttatgatgaactgagtgtattgagtatattatagaaattatattatttatataatttaattaaatatatatttatgaccttatgatgaa

SEQ ID NO: 3896 - DNA, 106 bp, homo sapiens
aaataattgtaggggttcatgacaaaaatgtatgtggtgaaagataagtaaaaataaatttcaataatcaaaaatatataaataattgtagaggttcatgacaaaa

SEQ ID NO: 3897 - DNA, 101 bp, homo sapiens
cacacaataacagtgggagactttaacaccctactgtcgtgcatagaaactacaaaaagacttagagtctcacacaataacagtgggggactttaacaccc

SEQ ID NO: 3898 - DNA, 103 bp, homo sapiens
gtttctgctgctgcgtcagtgagcacaactattctgatcaacagggtccagggaccgttgtgggttcttgagcaagaagggtttctgctgctgcgtcggtgag

SEQ ID NO: 3899 - DNA, 85 bp, homo sapiens
tgagaatctgtttggatttttggtagggtgagggtagggtgaatttttggtagagtgagaatctgtttgaatttttggtagggtg

SEQ ID NO: 3900 - DNA, 84 bp, homo sapiens
tttcaattcctaggaatttttctataatattacgttcccccctgatggtgtagtagctaggattcaattcctaggaatttttct

SEQ ID NO: 3901 - DNA, 97 bp, homo sapiens
ctactagtagtagccaacatttatgatccaacataattgttggatctagttgttggctactagatccaactactagtagttggctactagtagtagc

SEQ ID NO: 3902 - DNA, 96 bp, homo sapiens
gtgaagcagaagggctttgggaccaatcaatgcaataaattagcctatagatgtgaagttagcctacggatgtgaagcagaagggctttgggacca

SEQ ID NO: 3903 - DNA, 144 bp, homo sapiens
acaggaagcattgtcaaatataaaatggtgtttgattttctttgggttgtatttgatgacatatttggcttatttggtataaaaattatacaggaagcattgtcaaatataaaatggtgtttgattttctttgggctgtatttg

SEQ ID NO: 3904 - DNA, 93 bp, homo sapiens
ttacaaacctttagctagacacagagtgctaattggtgcgtttttacagagtgctgattggtgcatttacaaacctttagctagacacagagt

SEQ ID NO: 3905 - DNA, 79 bp, homo sapiens
gttccaaactttcccacatcttcctgtcttctgagccctccaagtctctaggaagttccaaactctcccacatcttcct

SEQ ID NO: 3906 - DNA, 102 bp, homo sapiens
gctgaggtaggagaatcacctgagcctggggagctctacaacatgcctgtagttccagttactcaggaggctgaggtgggagaatcacctgagcctggggag

SEQ ID NO: 3907 - DNA, 102 bp, homo sapiens
gtgtaattttgtaacttcacttcagcctctgacaggtcactttccacaaccaatcagacgtctgcatagggtgtaactttgtaacttcacttcagcctctga

SEQ ID NO: 3908 - DNA, 108 bp, homo sapiens
caccaatcgacactctgtatctagctcaaggtttgtaaacacaccaatcagcaccctgtgtttagctcaaggtttgtgagtgcaccaattgacactctgtatctagct

SEQ ID NO: 3909 - DNA, 117 bp, homo sapiens
cctccactgatgtgctcctcttggcatccagccacctgtgtgttactctgctgatgtgctcctctcaacatccagctgcctgtgtgttcctccactgatgtgctcctcttgacatcc

SEQ ID NO: 3910 - DNA, 198 bp, homo sapiens
tcatgacttacttgttttctttcgttctttctttttctttctttctttctctgtctctctctctctctttccttccttccttccttccttccttccttccttccttccttctttctttctttctttctttctttctttctttctttctttctttctttctttctttctttccttctttctttctttctttttttttga

SEQ ID NO: 3911 - DNA, 79 bp, homo sapiens
attacaaacaatgttgccataaatatttgtttcaatttttgattttttcctaattacaaacaatgctgccataaatatt

SEQ ID NO: 3912 - DNA, 82 bp, homo sapiens
tggagggctcagaagaagacaggaaaatgtaggaaagtttggaacttcctagagacttggagggctcagaagaagacaagaa

SEQ ID NO: 3913 - DNA, 82 bp, homo sapiens
cctcggctgggcatcagagggagacagtgcaaagagggagagggcagtacagtacatcctcggctcggcatcagagggagac

SEQ ID NO: 3914 - DNA, 91 bp, homo sapiens
attattaagtagtatggggctatttattttaactatagtttaaaatattaatgataataatattattaagtagtatggggctacttatttt

SEQ ID NO: 3915 - DNA, 86 bp, homo sapiens
ctctgttgccaggctggagtgcagtggcacgatctgttttttttgagacggagtcttgctctgttgccaggctggagtgcagtggc

SEQ ID NO: 3916 - DNA, 108 bp, homo sapiens
cagtggcctgatctcggctcactgcaacctccacctcccaaattccagcgattctcctgcaaccgctgcctggagtgcagtggcctgatctcagctcactgcaacctc

SEQ ID NO: 3917 - DNA, 113 bp, homo sapiens
actttagtacagcaaacaaccatttatctggaatatggttaatagtcattagaaacagtaattctcagtaattctctgaactttagtatagcaaacaaccatttatctggaat

SEQ ID NO: 3918 - DNA, 85 bp, homo sapiens
accccttccctccatgtctctaccccttctccactttcctggggggcaagcaccccccccaccccttctctccatgtctctaccc

SEQ ID NO: 3919 - DNA, 120 bp, homo sapiens
aagattcaggtggactgggaaagcatcattatatatttattctctctaatagcacatctagaattcagcaccttctggattcaaagattcaggtggactgggaaagcatcattatatatt

SEQ ID NO: 3920 - DNA, 118 bp, homo sapiens
tctgtcttccatacctggacttgttaggaaaagcttggacaatcagctagcttggctttaaacctttgttttcattgttctgtattccatacctggacttgttaggaaaagcttggac

SEQ ID NO: 3921 - DNA, 108 bp, homo sapiens
caatattttacactgctcttaattatgtgtcatgaactcttattttcacatagaccatgtgactattgctatgctatttaccaatattttacactgctcttacttatg

SEQ ID NO: 3922 - DNA, 151 bp, homo sapiens
gcttttctggggaaggggcaagtacctcaaccccttctctccttgtctctaccccttctctgcttttctgggggaggggcaagtacccctcaaccccttctccttcacccttagcggcaagtcccgcttttctgggggaggggcaagtacc

SEQ ID NO: 3923 - DNA, 118 bp, homo sapiens
taattgtactttatgaatacttttataggcttggttatgattataaatcacatcagatttctacaacgtttatttcacataatattgtaattgtactttatgaatacttttataggct

SEQ ID NO: 3924 - DNA, 157 bp, homo sapiens
tcggcactctgtatctagctcaaggtttgtgaacacaccaatcagcaccctgtgtctagctcagggtttgtgaatgcaccaatcgacactctgtatctagctactctggtggggacttggggaacctttgtgtcgacactctgtatctagctaatct

SEQ ID NO: 3925 - DNA, 114 bp, homo sapiens
atgattttgtgcataaagttttttctgcacttaaaaatgattttaggatagattattataagtagaattactgggacaattcgaacatgattttgtgcataaagtttttctgcg

SEQ ID NO: 3926 - DNA, 96 bp, homo sapiens
atggctgtttaaagtaaccttgccaaggaaggttattttatacctaagtaacctatggctactttgatggctgtgtaaagtaaccttgccaaggaa

SEQ ID NO: 3927 - DNA, 129 bp, homo sapiens
tttatgaagtaagaaatcatcttgtcatagattaccattgacactaaatattcaaatttaattttacctcttcatgtctatcttgtattgatcttttatgaagtaagaaatcatcttgttatagattac

SEQ ID NO: 3928 - DNA, 92 bp, homo sapiens
tgtcccaaatactaagttatttcaaagaaaatgtgctagccttggagtcttactgaaggctaagtgtgtcccaaatactaagctatttcaaa

SEQ ID NO: 3929 - DNA, 74 bp, homo sapiens
taattatgaaatatttcagtgattgattctattgctgtatcatagatctttaattatgaaatatttcagtgatt

SEQ ID NO: 3930 - DNA, 101 bp, homo sapiens
tccttcacccttagtggcaagtcccgcttttctgggggaggggcgagtacccccaaccccttctccttcacccttagtggcaagtcccgcttttctagggg

SEQ ID NO: 3931 - DNA, 122 bp, homo sapiens
caaaaagtttttaaaaagtagattgcagaataatattagagaattaattctcacaaactatacaaactatattgaccaaaaagtttttaaaaagtagattgcagaataatattagaaaatta

SEQ ID NO: 3932 - DNA, 68 bp, homo sapiens
ttgttatatatacatatattacaaatagaaaaggcacatacatatatgttatatatacacatattgca

SEQ ID NO: 3933 - DNA, 136 bp, homo sapiens
tattatttggcaatttacaaaaggaatgaactatggatacatgatatgacacagatgaatgaatagataaaatatgatatttgcccaatggggtattatttggcaatttacaaaaggaatgaactacggatacatg

SEQ ID NO: 3934 - DNA, 133 bp, homo sapiens
cagtattcagtgggaatttaaattagaaatattttagaagaaattaaagtgtagttttcactcccactgaagaggctagaaaaaccagtattcagtgggaatttaaattagaattattttagaagaaattaaa

SEQ ID NO: 3935 - DNA, 134 bp, homo sapiens
caacctccgcctcctgggctcaagcaatcctcctgcctcccaggtaggctgggactagcccgggctaagtgcagtggcataatctcgacttattgcaacctccacctcctgggctcaagcaatcctcctgcctc

SEQ ID NO: 3936 - DNA, 81 bp, homo sapiens
aagtctctagggagttccaaactttcccatatcttcccgttctctgagctttccaagtctctaggaagttccaaactttcc

SEQ ID NO: 3937 - DNA, 106 bp, homo sapiens
ggctgagggaagagaatagctggaacccgggatgagccaggcatggtggcatgtgcctgtaatcccagctattcgggagggctgagggaggagaatagctggaacc

SEQ ID NO: 3938 - DNA, 99 bp, homo sapiens
aatccctttagaatcctacctatctgtggatgctagacttgcctctgtggttgctagatttgcttgtcttctttgaatccctttagaatcctatctatc

SEQ ID NO: 3939 - DNA, 123 bp, homo sapiens
tgtaacgtgacaaatgttttgattgatagggaaagagtagggaaagattaaagtgcaataaggaatgtagccaattccagtgtaacatgacaaatgttttgattgatagggaaagagtaggga

SEQ ID NO: 3940 - DNA, 125 bp, homo sapiens
ataaatgtccatgaaatcttcacaatttatgttcagagattgcagtaaagacaggtataagaaattataaaagtattaatttggggaactaataaatgtccatgaaatcttcacaattcatgttc

SEQ ID NO: 3941 - DNA, 89 bp, homo sapiens
ggctaagatttcaagctacttgttgattgattcacaatgtttctggtacccagtctaactgggctaagatttcaaggtacttgttgatt

SEQ ID NO: 3942 - DNA, 155 bp, homo sapiens
ctgcttttctggggaaggggcaagtaccccaactctttctctccttgtctctaccccttctctgcttttctgggggaggggcaagtacccctcaaccccttctccttcacccttagcagcaagtcccgcttttccagaggaggggcaagtacccc

SEQ ID NO: 3943 - DNA, 90 bp, homo sapiens
aacaaagaggaagggaggaggtggtagaactaaagagaagccatggaaagaaatagctttggatgaaacaaagaggaagtgaggaggtgg

SEQ ID NO: 3944 - DNA, 97 bp, homo sapiens
aaaagttgacactttttatagatattagggaaatatctttccctaataaatatctttccctaaaaaagttgacacttttttagatattagggaaata

SEQ ID NO: 3945 - DNA, 125 bp, homo sapiens
ataaatgtccatgaaatcttcacaatttatgttcagagattgctgtaaagacaggcgtaagtaattataaaagtattaactttaggaactaataaatgtccatgaaatcttcacaatttaggttc

SEQ ID NO: 3946 - DNA, 90 bp, homo sapiens
aagttccttgtagattctggatattgggcctttgtcaggtggatagattgcaaaatttttgtttaagttccttgtagattcttggatatt

SEQ ID NO: 3947 - DNA, 117 bp, homo sapiens
attccctagacctgacttctcaaacaaaccgttctattcttaccattccctagacctgactgctcaaacaaactgttctattcttactattccctagacctgactgctcaaacaaac

SEQ ID NO: 3948 - DNA, 162 bp, homo sapiens
agtctcctctctgctgagagctgagcagacatcaggattgccactggcagtgaggagctacctactccagggtctcctctctactgagagctgaacacccaacagaatggcctacctgcagagaactactcactcccaggtctcctctctactgagagctga

SEQ ID NO: 3949 - DNA, 80 bp, homo sapiens
ttttattacttacatttcccaagaggagggggggcacttacattaaatgtaagtaattttattacttacatttcccacga

SEQ ID NO: 3950 - DNA, 106 bp, homo sapiens
ctctatagagggacagaactaattatatatatatgtgtatatatatgtgtgtgtgtgtgtgtgtgtgtatatatatatgtccctctatagagggacagaactaatt

SEQ ID NO: 3951 - DNA, 83 bp, homo sapiens
tccttgtataattgagaatatggtttattgggtaaggttgattttgaaaactgctccttgtataattgagaatacggtttatt

SEQ ID NO: 3952 - DNA, 90 bp, homo sapiens
ttatttacagttactagtttattataaaggatatcacaaaggacacagatgaactagtttattatttacagttactagtttattacaaag

SEQ ID NO: 3953 - DNA, 156 bp, homo sapiens
tcttgtgttttttgtcaacatcattaaactgtgacaggttaacttgttgatattctagctattgctttgctatggataataaactgccctttgtctctgaccaaggagtcttgtgttttttgtcaacatcattaaactgtgacaggctaacttgtt

SEQ ID NO: 3954 - DNA, 83 bp, homo sapiens
agcaagtgccactacatatggctaattttaaattttaaaattaattaaatttaaagcaagtgccactacatgtggctaatttt

SEQ ID NO: 3955 - DNA, 95 bp, homo sapiens
tgcacaccatgacgcccagataacaggtgcacaccatgcacgacaacaggtgcacaccatgcacacaacaggtgcacaccatgacacccagataa

SEQ ID NO: 3956 - DNA, 108 bp, homo sapiens
gttatacaagctggtaagaaaaacacagagatcctagtagtacagcaattctttactatttaaaacagttataccaagctggtaagaaaaacacagagatcctagtag

SEQ ID NO: 3957 - DNA, 83 bp, homo sapiens
cttttttgcactatatatattttgcactatatatatactgcaaaatacatatatacatattttgcactatatatagtgcaaaa

SEQ ID NO: 3958 - DNA, 99 bp, homo sapiens
cccccatccccttttcagctcccctttccactgagaggagacggctggacttcaggggaagattacctaccccccatccccttttcagctcccatttcc

SEQ ID NO: 3959 - DNA, 101 bp, homo sapiens
ggggggggttcttgccctccagaaaagcagagaaggggtagagacacggagagaaggggttgggggggggggttcttgctctccagaaaagcagagaaggg

SEQ ID NO: 3960 - DNA, 99 bp, homo sapiens
atgtgtacattattgcatatcagttatcatagccttgtcagaaattaaacaagcatactcttaagagatgtgtacattattgcatatcagttatcatag

SEQ ID NO: 3961 - DNA, 74 bp, homo sapiens
aaaaaaaggattttgagtagccggtggaggctatgcaagagttagcaggaaaaaaaaaggattttgagtagctg

SEQ ID NO: 3962 - DNA, 100 bp, homo sapiens
taggtttacttaatttaaacattacatgacttattaacccaaatccccagtgggggaaaaaagtaacctaggtttacttaatttaaacataacatgactt

SEQ ID NO: 3963 - DNA, 90 bp, homo sapiens
aggcatgcatcaccatgcctggctagcaatcctcctgcctcagcctcttgagtaactgcttctacaggcatgcatcaccatgcctggcta

SEQ ID NO: 3964 - DNA, 84 bp, homo sapiens
catttagatacacaaatacttgcctgcattacattaggcaagtatttgtgtatctacaatacattagatacacaaatacttgcc

SEQ ID NO: 3965 - DNA, 101 bp, homo sapiens
taagatttatataagggtgaagttgttttatcattttatctagacgaacccataagtcaatgactataagatttatataagggtgaagttgttttgtcatt

SEQ ID NO: 3966 - DNA, 99 bp, homo sapiens
agtctattctgaaaatagcagctagcataattcttgctccctacagtctattcttgctccctacagtctattctgaaaatagcagctagcataattctt

SEQ ID NO: 3967 - DNA, 118 bp, homo sapiens
acataatcagtgattggtggagctgggatttgaaactaggcaattaaaaaaaaaacagaaaagtttagcaatttgactaaggatacataatcagtgattggtggagctgggctttgaa

SEQ ID NO: 3968 - DNA, 99 bp, homo sapiens
tctctctctctctctatatatatatatatatatttctatatttctatatatatatatgtgtgtgtgtgtgtgtgtgtatatatatatatatatattttt

SEQ ID NO: 3969 - DNA, 80 bp, homo sapiens
ttttatttttgagacaaagtcacaaattacgtctatgaaactttactttttgtttcttttatttctgagacaaagtcaca

SEQ ID NO: 3970 - DNA, 73 bp, homo sapiens
ccccaccagattagctagatacaaagtgttgacacaaaggttctccaaggccccaccagagtagctagataca

SEQ ID NO: 3971 - DNA, 76 bp, homo sapiens
atcagttaaggcaggaacaggccattttcacttcttttgtggtggaatgttatcagttaaggcaggaaccggccat

SEQ ID NO: 3972 - DNA, 101 bp, homo sapiens
tttgtttatatagacacattcaaagtaagttaggaaaaatgaactacctatctttacttatctttgaaatttttgtttatatagacatattcaaagtaagt

SEQ ID NO: 3973 - DNA, 159 bp, homo sapiens
tctgtctagctaaaggtttgtaaatgcaccagtcagcactctgtgtctagctaaaggtttgtaaatgcaccaatcagtgccctttgtctagctaatcgcataggggactgggagaacttttgtgtctagctaaaggattgtaaatgcaccaatcagtgc

SEQ ID NO: 3974 - DNA, 95 bp, homo sapiens
ctttgtagatagatagatagacagacagatagatagatgatggatagatagatgatagatagatgatagatagaaaatagatagacagacagaca

SEQ ID NO: 3975 - DNA, 113 bp, homo sapiens
ctttctgaagaatttttccaattcttttaagttgtgtaatttgtatttcttcttgagttgattttggtaattttgcctttctgaagaatttttccaactcttttaagttgtgt

SEQ ID NO: 3976 - DNA, 113 bp, homo sapiens; identical to SEQ ID NO: 3975

SEQ ID NO: 3977 - DNA, 104 bp, homo sapiens
ttggcagcttgtagttcccagagcagtactccaggaggtgaattccaccagcctcttagggtagtctgactttttattggcagcttatagttcccagagcagta

SEQ ID NO: 3978 - DNA, 110 bp, homo sapiens
tattctgatggtgtatgatgtattctgtatgtataggtaagtattctgtatatatatatatgtattctgtatgtatatgtaggtattctgatgatgtatgatgtattctg

SEQ ID NO: 3979 - DNA, 108 bp, homo sapiens
ggagtagaaactggtacagccttatggaaggcaaccttatggaagttgcctcacatattgctcacatattgctgatgggagtagaaactggtacaaccttatggaagg

SEQ ID NO: 3980 - DNA, 82 bp, homo sapiens
taaagcctgccaccagatgcagctgtataactgaagtacatcaattcacttgccactataaagcctgccaccagatgcagct

SEQ ID NO: 3981 - DNA, 93 bp, homo sapiens
ttttctctttgcctcttatttttcatgctaaaagttaaatatataacatatgtgtatatataaccaactattttctctttgcctcttattttt

SEQ ID NO: 3982 - DNA, 105 bp, homo sapiens
attcattctcacatctcaaacacatgagcattcactctcattcattcacaattcattctcatatctcaaacacattcactctcacatctcaaacacatgagcatt

SEQ ID NO: 3983 - DNA, 100 bp, homo sapiens
tagattacattgaatctgtacattgctttggctagtatgtgaaaaatctcatcagaatgttgatagattacattgaatctgtacattgctttggctagta

SEQ ID NO: 3984 - DNA, 94 bp, homo sapiens
ggacataacagattttaggcactgtaactgtctcctggtctctcccgactgtggccccctcggacataacagattttagacactgtaactgtct

SEQ ID NO: 3985 - DNA, 78 bp, homo sapiens
ccaccaaactcttgatcattttttaatcaatagttttttttttcgtcaatacctccaccaaactcttgatcttttttt

SEQ ID NO: 3986 - DNA, 96 bp, homo sapiens
tgtccaccatggagggaatattcccattttcatgatactaatgtgagaaatggttagaagagctataaaagatgtccaccatggagggaatgttcc

SEQ ID NO: 3987 - DNA, 117 bp, homo sapiens
aatacttttataatttcttatgcctgtctttactgcaatctctgaagataaactgtgaagatttcatggacatttatcagttctcaatactcttataatttcttatgcctgtcttta

SEQ ID NO: 3988 - DNA, 99 bp, homo sapiens
aatagatcatagtatttaatgctattgaatatagtatttaatgtatttaatataatattgaatatagtatttaatagaacatagtatttaatgctattg

SEQ ID NO: 3989 - DNA, 75 bp, homo sapiens
tggaaactgaaattggcaacattctccatcagccttgtcttgagcatgttgctggaaactgaaactggcaacatt

SEQ ID NO: 3990 - DNA, 103 bp, homo sapiens
tatattttatgcatttaaaaccatattttcaaaaacaactatattttagtaaaactggctttctttataatcctagatattgtattttatgcatttaaaacca

SEQ ID NO: 3991 - DNA, 93 bp, homo sapiens
tggtctccacaaccccttaccttggctcagacattccttcctattgattctatctgcataatgggaaccctggtctccacaaccccttatctt

SEQ ID NO: 3992 - DNA, 93 bp, homo sapiens
tatgatcataccactgcatgccagcctgggtcagcccaggaggtcaaggctacagtgaattatgatcattccactgcatgccagcctgggtca

SEQ ID NO: 3993 - DNA, 79 bp, homo sapiens
atctcttagtgtttcagtttgtcttagtgtgcttgtgtgggagagaagggagaaatctcttagtgtttcagtttgttct

SEQ ID NO: 3994 - DNA, 96 bp, homo sapiens
tatatacatatattccattagttctgtcttcctagacagatcatgtgagttaatacttaataaactcctatatatatatattccattagttctgtc

SEQ ID NO: 3995 - DNA, 90 bp, homo sapiens
gctgcctttatccaggctgccaccacctcatcaattctcaaactataggcattctccctgcgctgcctttatccaggctgccaccacctc

SEQ ID NO: 3996 - DNA, 120 bp, homo sapiens
atactttaaatttgtttttatttattatacaggaaagaaaagtgtctcctgcagtagctgggacattttacatatccctccattaagcatactttaaatttgtttttatttgttatacag

SEQ ID NO: 3997 - DNA, 116 bp, homo sapiens
accttggcaacagtcattatattattaatataaatcaatatattgtattaatgtattataaagcatctactttcaatataaagcactaaccttggcaacagtcattatatcattaa

SEQ ID NO: 3998 - DNA, 108 bp, homo sapiens
caccaatcggcactctgtatctagcttaaggtttgtaaacacaccaatcagcaccctgtgtttagctcaaggtttgtgaatgcaccaatcgacactctgtatctagct

SEQ ID NO: 3999 - DNA, 105 bp, homo sapiens
cttaacactgcactttacatccaggtctgtcagaaagactggaatgattgtattggctgagtttattattttgaaagcttaacactgcactttacatccaggtct

SEQ ID NO: 4000 - DNA, 149 bp, homo sapiens
ggggcaaaaaataaaaggaagaaaattatcattgacaacaaaactaaattgtggtatatctttctgtatgttttaaaatttcataatgagaaagttggggcaaaaaagtaaaaggaagaaaattatcattgacaacaaaactaaattgt

SEQ ID NO: 4001 - DNA, 99 bp, homo sapiens
tgtgtctagctaaaggattgtaaatgtaccaatgagcactctgtaaaattgcacaaatcagcactctgtgtctagctaaaggattgtaaatgcaccaat

SEQ ID NO: 4002 - DNA, 105 bp, homo sapiens
aaagtacagagagattagagaagaaagacagtctagtcgagaccagactgaccagcatggtgaaaccccatctctactaaaaatacagagagattagagaagaaa

SEQ ID NO: 4003 - DNA, 115 bp, homo sapiens
tcccggacggggcggctggccgggcggggggctgacccccccacctccctcccggacggggcggctggccgggcagagggactcctcacttcccagtaggggcggccgggcagag

SEQ ID NO: 4004 - DNA, 78 bp, homo sapiens
cacctcagcctcccaaagtgctgggtcaaattcctgatttcaagtgatcctcacacctcagactcccaaagtgctggg

SEQ ID NO: 4005 - DNA, 84 bp, homo sapiens
gccatacgttatgcaaggggctttccctgtatttcctcttttaattccacacatatgccatacgttatgcaaagggctttccct

SEQ ID NO: 4006 - DNA, 122 bp, homo sapiens
tattttcattcaaattttaggttaaaaaaaggtgttagggcctttgcccatttaacaacgcactgtgaaattgcagaacaaaaagttttctattttcattaaaattttaggttaaaaaaagg

SEQ ID NO: 4007 - DNA, 108 bp, homo sapiens; identical to SEQ ID NO: 312

SEQ ID NO: 4008 - DNA, 81 bp, homo sapiens
agtttgccatgctctgcctgcacaccacgtagggtggccctggaaatgcctccagtttgccatgctctacctgcacaccac

SEQ ID NO: 4009 - DNA, 107 bp, homo sapiens
tctgaccctgtggcatcgcccatcacccacagcagttacacttctccagccaagcccggacacctcctgtctgaccctgtggcatcgcccatcaccctcagcagtta

SEQ ID NO: 4010 - DNA, 143 bp, homo sapiens
ttttgtgtttttcttggtgttttagattcattcatctagaatttattgggaggagtggcataggtttgttaaatattcacttctctcttgtggggattttgtgtttttcttggtgtgttagattcattcatctagaatttatt

SEQ ID NO: 4011 - DNA, 145 bp, homo sapiens
tcgtggtctcgctggctcaggagtgaagctgcagaccttcgcgatgagtgttacagctcttaaagcagcgcgtctggagttgtttgttcctcccagtgggctcgtggtctcgctggcttcaggagtgaagctgcagaccttcgcg

SEQ ID NO: 4012 - DNA, 93 bp, homo sapiens
ccttggcctcccaaagtgctgggattataggcgtgatctgcccgccttggccttgtgatctgcccgccttggcctcccaaagtgctgagatta

SEQ ID NO: 4013 - DNA, 111 bp, homo sapiens
tggaggaagggcacgtgccgcgtgtgtgtgcggttatgtgtgggtatgtagcactgggaaagtgcattctctgggacgggtggaggaagggcaggtgccgcgtgtgtgtgc

SEQ ID NO: 4014 - DNA, 93 bp, homo sapiens
aattcatttaacatcaacaaatactgacgatttcaatttactgtcatttgtaaatgaattaacaaattataattcatttaacatcaacaagta

SEQ ID NO: 4015 - DNA, 97 bp, homo sapiens
cttcagctaggcctaggctgagcgagggctgtgcctgtgtggaaagcatctatttcataggtcagcttcagctaggcctgggctgagcgagggctgt

SEQ ID NO: 4016 - DNA, 92 bp, homo sapiens
ataaggtagctaaaaaagcagccatcaaaaggcatcagatcccatcactcaggacaatgcttatgctgataaggtagctaaaaaagcagcta

SEQ ID NO: 4017 - DNA, 80 bp, homo sapiens
caagtctctaggaacttccaaactttcccacatcttcctgtcttttgagccctccaagtctctaggaagttccaaacttt

SEQ ID NO: 4018 - DNA, 75 bp, homo sapiens
agatatgcaagtgggttggaaggaccccccagcatcgtccctctgatggtagatatgcaagtgggttggagggac

SEQ ID NO: 4019 - DNA, 150 bp, homo sapiens
gcataagaaattataaaagtattaattttgggaactgataaatgtccatattaaaatgaaatattcacaatttatgttcagagattgaagtaaagacaggcataagaaattataaaagtattaatttggggaactgataaatgtccatat

SEQ ID NO: 4020 - DNA, 71 bp, homo sapiens
atttaacccaactgcatatacacaccaagtattcagtactgagccaccatttaacccaactgcatatacac

SEQ ID NO: 4021 - DNA, 78 bp, homo sapiens
aggtgtacttacctacatatagctgtttgtaggttatatttgaaaagtaggtaaggtgtacttacctacatataactg

SEQ ID NO: 4022 - DNA, 84 bp, homo sapiens
ccctcgagaactgatgctctggtatcagagcatggtcaggccggaacatcgtaatgcaccctcgagaactgatgcgctggtatc

SEQ ID NO: 4023 - DNA, 129 bp, homo sapiens
cttggttttgtgtcctgggctcaggatacggaaggtgtgcccactgggtgggactgtgctcgtctgtgtgtgtgtactcattgctgttccctcacttggttttgtgtcctgggctcaggatatggaagg

SEQ ID NO: 4024 - DNA, 116 bp, homo sapiens
cccagctaatttttgtgtttttagtagagacggcattttaccatgttggccgtagctggcatggactacaggcatgcgctaccatgcccagctaatttttgtgtttttagtagaga

SEQ ID NO: 4025 - DNA, 108 bp, homo sapiens
ataaagatactatctaatacttaatgaataatatcattgaattgatatattaattgatattatcaataatgtcattgataatgataaagatactatctaatacttcat

SEQ ID NO: 4026 - DNA, 90 bp, homo sapiens
ataatgttaaatcaagtttagcctaaatctaacaaattatataacattatatatgcatatataatgttaaatcaagtttagcctaaatct

SEQ ID NO: 4027 - DNA, 95 bp, homo sapiens
ctcagcctggacctcattgtttatcctttatcccagttcccaacaagttcctcatctccatctgagaccacctcagcctggacttcattgtttat

SEQ ID NO: 4028 - DNA, 89 bp, homo sapiens
ttataaagtaggctcacatgggcagcggagaggaaacactgtgtgcccctcacctgcagctcattatgaagtaggctcacatgggcagc

SEQ ID NO: 4029 - DNA, 137 bp, homo sapiens
tcagtgcctgtggtcacgtaagccaattccttacagtaatactctctctctctttctctctctctctctctctctctttctctctccccccccccatcagtgcctgtggtcacataagccaattccttacagtaata

SEQ ID NO: 4030 - DNA, 110 bp, homo sapiens
tcttggagatatatacgtatatgaatacatatgtgtatctatcttgtatatctatcttgaaaaagatatacaagtgacatatttcttggagatatatatgtatatgaata

SEQ ID NO: 4031 - DNA, 116 bp, homo sapiens
aatcttctgcatatggctagccatttatcccagcaccatttatttaatttttgtatatggtgtaaggaagggattcagtttcaatcttctgcatatggctagccagttatcccagc

SEQ ID NO: 4032 - DNA, 107 bp, homo sapiens
aacaaacaaatatgcagataaacacatctccctgacaatctactctgctaagtacattgcttgcaaaatacttaaacaacaaacaaacaaatatgcagataaacaca

SEQ ID NO: 4033 - DNA, 81 bp, homo sapiens
tttctttttgagacggaatctcgtcgtcaccctggagtgcagtggctccttttttttttttttttttgagacggaatctcg

SEQ ID NO: 4034 - DNA, 105 bp, homo sapiens
tgctcccacacgctgcactcacacagggccctgctatgctcctatgctccgtgctcccacataccacacgtgctcccacgcgctgcactcacacagggccctgct

SEQ ID NO: 4035 - DNA, 99 bp, homo sapiens
cactccagcgagactccagatgtctgccctcaggttggcactgggcatctgcaaggcccacattgcaggctacactccagcaagactccagatgtctgc

SEQ ID NO: 4036 - DNA, 104 bp, homo sapiens
taagatgctggaccccgtacttgctaaatgacgacccaaggtgagttctgcaggttcgccggcacagcgacggtccccataagatgctggaccccatacttgct

SEQ ID NO: 4037 - DNA, 102 bp, homo sapiens
aaggattcagtagaggaaaagagacatggaatatgacacaccagaactaccgtatcattctgtagtgggcagtgtgggaagggattcagtagaggaaaagag

SEQ ID NO: 4038 - DNA, 234 bp, homo sapiens
tgtaaacccaccagtcagcactctgtgtctagctaaaggtttgtaaacgcaccaatcagcactctgtgtctagctaacggtttgtaaacgtgccaatcagcacttgtttagctaaaggtatgtaaacgcaccaatcagcactctgtgtctagctaatctggtggggacttggagaacttttgtgtctaactaaaggattgtaaacacaccaatcagcactctgtgtctagctaa

SEQ ID NO: 4039 - DNA, 137 bp, homo sapiens
ctgcaggggagcacgatggacccatggctccactgatgcacctcgggatgcatgaggcagccctgggagtgcagagctcccacccctgcagggcagcacgatggacccatggctccactgatgcacctcgggatgca

SEQ ID NO: 4040 - DNA, 98 bp, homo sapiens
gcctattcctacagggcatctgtccccacctgtgggggtctattcctacagggcatctgtccccacctgtgggggtctattcctacagggcatctgtc

SEQ ID NO: 4041 - DNA, 101 bp, homo sapiens
cgctttaacaaatcatttctctctgaaactcagacataaggcctggctccaacactaataaccatgcacgcttgaacaaatcatttctctctgaaactcag

SEQ ID NO: 4042 - DNA, 95 bp, homo sapiens
ctgtggcctcccaaagcaccagtatgtttcccaggtggtctctaactcctggcctcaagagaccctcccactgtggcctcccaaagcaccaggat

SEQ ID NO: 4043 - DNA, 99 bp, homo sapiens
ggagcccacttggccaccgcaccccagccatgacctctccatccccatcaaattccttaaaacacacttggagcccgcttggccaccgcaccccagcca

SEQ ID NO: 4044 - DNA, 93 bp, homo sapiens
gatggctgctccacaggcagagcagtggaacaaatgatggctgctccacgggcagagcagtggaataaccgatggctgctccacagacagagc

SEQ ID NO: 4045 - DNA, 138 bp, homo sapiens
atcacaggctcagaagacacccgcagggctccctggcattcagcacacagcaggtgacttaggactgcagaaggatgcagggatggggtgcgtcctgagatcacaggctcagaagacacccacagggctccctggcat

SEQ ID NO: 4046 - DNA, 88 bp, homo sapiens
aggtaatttctggggtgagaaatccttaaggaaggtactgccgaaatacactctgtggttgcagaggtaatttctggagtgagaaatc

SEQ ID NO: 4047 - DNA, 80 bp, homo sapiens
tgtagagagaacccccaggctaccctgtcactcctgtcccaggcaggagggctttgtagacagaacccccaggctaccct

SEQ ID NO: 4048 - DNA, 131 bp, homo sapiens
gtcatgggggtggggcctcaggaatgggattagtgccctgtataagagagaccctccgcccctccatcatgtgaggtttgggaggtgatacagtcatgggggtggggcctcaggaatgggattagtgccct

SEQ ID NO: 4049 - DNA, 130 bp, homo sapiens
gcttgcaccccgtgttcacagcagcaccattcacaacagccgacaggtgggagcgagccgagcatccaaatggaggtgcagacagatgcttgcaccccgtgttcacagcagcaccattcacagcagccga

SEQ ID NO: 4050 - DNA, 115 bp, homo sapiens
cacacatgctggaatcctcgttccctctgaaatccctgggcggccgcccccttcccacccaggtacgcacacagggccacgcacacatgctggaatcctcgttcccgctgaaatc

SEQ ID NO: 4051 - DNA, 95 bp, homo sapiens
catgcctttctttgcattctttgtcttaacttccagtccagtgggattagtgctgtgtctcctggtggaaacatgcctttctttgtattctttgt

SEQ ID NO: 4052 - DNA, 158 bp, homo sapiens
gtaggactctggagaggtcattcctgatggcaggaaatatttctgcatcatcttgtgcaagggggcagcgggggcggctggtctctctcattaaaaggtgaccctgtaggactctggagaggtcattcctgatggcaggaaatatttctgcatcatct

SEQ ID NO: 4053 - DNA, 130 bp, homo sapiens
gccctgctgatgtcgacctgtgggatctgtagatggctttagggcaggtgtttcttgctcacagtttagagatgtatgcactcctcagggccctgctgatgtcgacctgtggggtctgtagatggcttta

SEQ ID NO: 4054 - DNA, 106 bp, homo sapiens
tgacttctttatgtcacagctctgcagtctcaggctgaatccatggttattgttgaagggatgtcatggattggttttggggtgacttctttatgttacagctctg

SEQ ID NO: 4055 - DNA, 107 bp, homo sapiens
tgtttctggttggttgtgttttcatatttcctcctcgtcttgaaggaatgcagacattggtttggtgcacgtgtttctggttggttgtgttttcctatttcctcctc

SEQ ID NO: 4056 - DNA, 103 bp, homo sapiens
acaggggcttgctgggaacctcggcggcggaaacagaccccgtcagtcatgctctagagaattgtgtctttaagcagtaacaggggcttgctgggaaccttgg

SEQ ID NO: 4057 - DNA, 82 bp, homo sapiens
tagctgatagcccaagacctcagccagtcctgccaccattgacattctcctgggttagctgatagcccaggacctcagccag

SEQ ID NO: 4058 - DNA, 79 bp, homo sapiens
ttcccctgccccatttgtctatgtcgtcttatgtaaaatgcattttcctgcatgtttcctctgccccatttgtctatgt

SEQ ID NO: 4059 - DNA, 76 bp, homo sapiens
actcctgacagtaattcacacaggctgggggttgctgagaggggtgagctgcgactcctgacggtaattcacacag

SEQ ID NO: 4060 - DNA, 80 bp, homo sapiens
ggaggagggaggctcacccagcccggggcctggccccatgggggtcctgctgcagaggaggagggaggctcacccagcgc

SEQ ID NO: 4061 - DNA, 145 bp, homo sapiens
gggagtggatttctcatgaatggtttagccccatcctcttgacactgtcctgttgaatggaatccctaatgttgaagggaagtgactgggttacgggagtggatttctcatgaatggtttagccccatcctcttgacactgtcct

SEQ ID NO: 4062 - DNA, 106 bp, homo sapiens
aaaatagagtgtgataggaagttatcatgggctgtaatataccttcactgatgagtctgtaatgagcatgcgttataggaaaatagagtgtgacaggaagttatca

SEQ ID NO: 4063 - DNA, 101 bp, homo sapiens
atttctctgctgataaactgtaaattcacttaaacaagattgttctcttaatcttaaacaagattctccccttgatttctctgttgataaactgtaaattc

SEQ ID NO: 4064 - DNA, 111 bp, homo sapiens
cggtggctcacacctttaatcacagctgggcactgtggctcacacctgtaatcccagcacttcaaaaagccagtcagggcagggcacggaggctcacacctttaatcccag

SEQ ID NO: 4065 - DNA, 79 bp, homo sapiens
cagtggctcacacctttaatcccagtgctttaaaaagccagttaggcccgggcacagtggctcacaccattaatcccag

SEQ ID NO: 4066 - DNA, 86 bp, homo sapiens
cccagcaggcccaggtccccgcgggtttccacacgtggcctctcctgatgtgcgggattctcccagcaggcccaggtccccgtggg

SEQ ID NO: 4067 - DNA, 102 bp, homo sapiens
ctttcaggatttcagcatttgggattttgatctttcaggatttatttttgggactctagactttaggaattttgatctttcaggatttcaacatttgggatt

SEQ ID NO: 4068 - DNA, 98 bp, homo sapiens
tcgcccgctgtgatctacagatttcggagaacgaaggtcacacttctgcactgggcagtcaaggccgtcgcccgctgtgatctacagatttcggagaa

SEQ ID NO: 4069 - DNA, 109 bp, homo sapiens
catgctcttccttcttagtgagactgaggatgtgttttctacgtgaggccacacaggagggagggtcaagtcactgctactcatgcccttccttcttagtgagactgag

SEQ ID NO: 4070 - DNA, 109 bp, homo sapiens
tcatgtcccacagccaccaagtctagacagagacacgtgctcatgtcccacaggcacccggagcctagagagacacacatgttcatgtcccacagccacccagtctaga

SEQ ID NO: 4071 - DNA, 84 bp, homo sapiens
ctgggcggtgggagacgctggccgcctctccgctcccacgtgtcctgtgtgctgtaggcctctgggcggtgggagaccctggcc

SEQ ID NO: 4072 - DNA, 93 bp, homo sapiens
gtgtgtctgtgagggtgttgttgcgggagactgacatttgaacctgagcatgagaaaggtgtgggccttggtgtgtctgtgagggtgttgctg

SEQ ID NO: 4073 - DNA, 103 bp, homo sapiens
caggaaaagctgaccagcaagaacaccgtgacaggaagtgggggtcagatgcctcattatacccccaaacgctggaactcagaaaagctgaccagcaagaaca

SEQ ID NO: 4074 - DNA, 844 bp, homo sapiens
aatattcgtaagatcctacggacatatgacttcaaatatcacattggatgtacacacatggtgtacacattgtgtgtgaacacctcctgtgatattattcataatatcctaggaaaatgggactcctaatatcacggtcagtggacaccctgtgatatgattggtaatatcctaaagagatgttaccactaaggtcacaatgtctgtacgctccctgatattattcgttatatcctcgggggatgttactcctaatgtcacacggggtgtactccctgtgatgttattcgtaatatcctagggtgatgttactttcaatgtcaccgggggcatatatcatgtgtattcaacacctgtgatactattcctaataccctaggggcatgttcctcctaatgttcacatggggtgaacaccatatgtgtacacctgctgtgatattattcgtaatatcctaggggaatgttactgctgatggcacaggagatgtacaccatgtgtgtcaaccgcctgtgtcattattcgtaatatcctagggggatgtttccttgaatggcacaaagtgtgagcaaaaggtcacagaaggtgtacaccttgtgatgttatctgtaataccctagaaggatgttactcctaatatgtcacaggggtgtacacactttgatattatttgtaatctcatagagatatatgtcttcaaatatcacagtggatgttcacacatagtgtataccctctgatattattcgtaatatcccagggatatgcaactcctgatatcacagtgcgtgtacccggtgtgtgtacacccttgatatgagtcgtgatatccagggtaaatatg

SEQ ID NO: 4075 - DNA, 114 bp, homo sapiens
gcctgcgctgctctgagggcccgtcggcagctgggtcagggccacggggagctgggacccccggcctccgtcgcacgtgcctgcgctgctctgagggcccgtcggcagctgggt

SEQ ID NO: 4076 - DNA, 95 bp, homo sapiens
gtgccctgtgcccccttccacaccagggtgctgactcacagtgctgttcccaacccacctcccacgcaggggtgccctgtgcctccttccacacc

SEQ ID NO: 4077 - DNA, 73 bp, homo sapiens
acgctgggcccgcccggccacacgtccaccccacacatccaccccatgtacgctgggcccgcccggccacaag

SEQ ID NO: 4078 - DNA, 75 bp, homo sapiens
atggccggggcacagcctggcctgcgggcgatgaagctggagagggcctgcaatggcctgggcacagcctggcct

SEQ ID NO: 4079 - DNA, 196 bp, homo sapiens
aaagatgtaaaaatattgtaataatattcaccgaagcactgccagcaacagaggctttattaaataaacgacactgaaaagatgtgtgtgtgtaataatattcaccgaagcactgtcagcaacagaggctttattaaataaacgacaatgaaaagatgtgtgtgtgtaataatattcaccgaagcactgtcagcaa

SEQ ID NO: 4080 - DNA, 81 bp, homo sapiens
actgagttagcccagtgtcccccagggtgggagcgggagtgggtgtccatagcactgagttagcccagtgtcccccagggt

SEQ ID NO: 4081 - DNA, 83 bp, homo sapiens
tttgttgacttatttttaaatattcttatgtttattttagcctcgggcaggtgtgcaggctttgttgatttatttttaaatat

SEQ ID NO: 4082 - DNA, 101 bp, homo sapiens
gggtggggtggaggactcaggcccagccctcccaaccctacaggggacccttgtgcccccaacttagtcggcctcctgggtggggtgaaggactcaggccc

SEQ ID NO: 4083 - DNA, 86 bp, homo sapiens
cccggcccccaccaccggaggagctgaaagcccttgctcagccgctgccctgctggtgaacccggcccccaccgccggaggagctg

SEQ ID NO: 4084 - DNA, 90 bp, homo sapiens
tcctcatccccaggttcccgccagcctctgctgcctgagaccctccactgagcgccaaggcctccgtcctcatccccaggctcccgccag

SEQ ID NO: 4085 - DNA, 103 bp, homo sapiens
ggcctcaggtcctatttgaagttgctctggtcctcccagagtgctgggattacaggcgtgagccaccgcgcccggccccaggtcctatttgaagttgctctgg

SEQ ID NO: 4086 - DNA, 103 bp, homo sapiens
cctgcaccagctctcctggcggggagcaggtcccgaggggccgagtgcacctggaggcccagcaccccagtcctctgcctgcaccagctctcctgggggggag

SEQ ID NO: 4087 - DNA, 123 bp, homo sapiens
aattatatctcaataaaaagctgttttttaaaaccacatactcagaatgatgagactacacctataagagcagccaaaaattatacctcaataaaaagctgttttttaaaaccacatactcag

SEQ ID NO: 4088 - DNA, 95 bp, homo sapiens
tgctatgggcccttccagagattccccacccagctcccctccaatggccaatgtccatgtcatggtttgctatgggcccttccagagattcccca

SEQ ID NO: 4089 - DNA, 117 bp, homo sapiens
atgccgggtccgggccgagcccacggccccgagtacaagtccgggttccgggtccgggccaagcccatggccccgagtccaagtccggatgccaggtccgggccgagcccacggccc

SEQ ID NO: 4090 - DNA, 110 bp, homo sapiens
agcaggcattgcggactcctgtgtccacttgcgaggttgctgaacgcccgccccgccacgcattcaccacgtgctcctgagagcaggcattgcggactcctgtgttccac

SEQ ID NO: 4091 - DNA, 80 bp, homo sapiens
tgtggagggggaaggggagaccaaggcaggagggtacccctggtccggatgcggatgtggacggggaaggggagaccaag

SEQ ID NO: 4092 - DNA, 79 bp, homo sapiens
agcaatctgcagaaaactcctagaatgacgtgacggcccacgtggaaaatcctgagcaatctgcagaaaactcctggaa

SEQ ID NO: 4093 - DNA, 104 bp, homo sapiens
cacacaggcccaggctgaggccagagggcctcttggagcaccccacgccagggtcagttccggtggggaggcgtggaacacacacaggcccaggctgaggacag

SEQ ID NO: 4094 - DNA, 79 bp, homo sapiens
cagagcccagcttcggaaggggagcactgcccccggcgcagtcacttgcagagtcagagcccagcttcggaagggaagc

SEQ ID NO: 4095 - DNA, 91 bp, homo sapiens
aggcacgaccctggcgcatctcccgagccagcgagaagcgagaccagggcacccccattcacctacgaggcacgaccctggcacatctccc

SEQ ID NO: 4096 - DNA, 107 bp, homo sapiens
acagtggggtgtttcagccacaagaaggaacacaaggtccaccagttgatgactggatatataagatgcggccgtgcacagtggggtgtttcagccacaagaaggaa

SEQ ID NO: 4097 - DNA, 94 bp, homo sapiens
accaagcctccagcccagaggaagggccagtgggttctgcactggggccaggaggcaatggacacaccaagccccagcccagaggaagggccag

SEQ ID NO: 4098 - DNA, 100 bp, homo sapiens
tgcctgggtcccatccacactggcatctgaagccggtgagagctgagggcgtccctgggttggcctgtgcctgggtcccatccacactggcctctgaagc

SEQ ID NO: 4099 - DNA, 186 bp, homo sapiens
agctagacacagagtgctgattggtgcatttacaaaccttgaggtagacacagagtgctgactggtgaatttacgaaccttgagctagacacagggtgctgattggtgtatttacaatcctttagctagacataaaagctctccaagtccccaccagattacctagacacagagcactgactggtg

SEQ ID NO: 4100 - DNA, 120 bp, homo sapiens
ttcccaggcccggccccaccctgcccttccttctctatcggatatacatgcccatccctggagacggccatggtcactcactctccccctttcccaggcccggccccaccctgcccttcc

SEQ ID NO: 4101 - DNA, 95 bp, homo sapiens
ggtggcacacgcctgtaatcccagctactggggaggctgaggcacaagaatcaccagaaccagccgggcgcggtggctcacgcctgtaatcccag

SEQ ID NO: 4102 - DNA, 104 bp, homo sapiens
cacaacctccacctccacctgctcccacacccctgcccaacttccacctccacctgcttcacacacccctgcctgactgcacaacctccacctccacctgccca

SEQ ID NO: 4103 - DNA, 126 bp, homo sapiens
gagccattgcactccagcctgggcaagaagagcaaaactccgtctaaataaataaataaaattttattttggtggaggttgcagtgagccattgcactccagcctgggcaagaagagcaaaactcc

SEQ ID NO: 4104 - DNA, 239 bp, homo sapiens
tttcctttgtgatggtgatggtgatgctgccaacgatgatggtgatggtgatggtggtaatgatggtgatggtgatggtggtgatgatggtgatggtggtggtgatggtgatgatggtgatgatggtggtggtggttgtggtggtggtgatggtgatggtgatggtgatgtcattgttgatgttggtgatggtgatggcattggtgatgtcggtgatggtggtggtgatggtgtcagtg

SEQ ID NO: 4105 - DNA, 76 bp, homo sapiens
gggggactattggacaggcatgttaacagacacacacacagtgtgaagagcaagggggactatcggacaggcatgt

SEQ ID NO: 4106 - DNA, 77 bp, homo sapiens
ttagtaataaattcatagtaaaattatgtaagtattgttagtaataaatattactttgtaataaattctatgtaaat

SEQ ID NO: 4107 - DNA, 95 bp, homo sapiens
aggtctggctaacagtaccagcatgagaacatagggtaacagcaagttgcttgccgtagttttaggtctggcttacagtaccagcatgagaacat

SEQ ID NO: 4108 - DNA, 99 bp, homo sapiens
tatatattactttgcaatcattatcataagcttaaaacttcccatgccacaccacactgcacatgtatatattactttgcaatcattatcataagctta

SEQ ID NO: 4109 - DNA, 144 bp, homo sapiens
atcaatgtttcttgtatgttaggagtgaactgaaagaaaatcttccgcttttgctaaacaattgttaggaacaactaagacacttctaatatactaactatcaatgtttcttgtatattaggagtgaactgaaagaaaatcttc

SEQ ID NO: 4110 - DNA, 137 bp, homo sapiens
ctaccccatctcctcccctaggggtgccacacccaccccctcccctgggagcgctgtccccatcccctcccttgggggcgctgtccttatctcttcctctacttgcgttgtccccatcccctcccctgggggcgctg

SEQ ID NO: 4111 - DNA, 244 bp, homo sapiens
ggaggtgagaccctccctcaggtggaggtgagacccttgtgggcatctgcacaatgaggcccctcagatggaggtgagactctccctcaggtggaggtgagaccctccctcaggcggaggtaagaccctctctcaggcggaggtgagaccctccctcaggcggaggtgagaccctccttcaggtggaggtgcgaccctcgtgggcatctgcaggatgaggtctctcaggtggaggtgagaccct

SEQ ID NO: 4112 - DNA, 84 bp, homo sapiens
ctgaagtgaggatttgagggtttcgatggctaccccagtgctgagaactggctcactttggctgaagtgaggatatgagggttt

SEQ ID NO: 4113 - DNA, 95 bp, homo sapiens
acctaaatgtaagaactaaaactataatgacacttctaagagtgtcatttaattcaaatggatcatacacctaaatgtaagagctaaaactataa

SEQ ID NO: 4114 - DNA, 129 bp, homo sapiens
gcgtgcaatatccttttctgctaaatcagaagatcctcaatttagagcaaaacttgtacgtccacatttaagttcctttatgagctccttccttgcgtgcaatatccttttccgctaaatcagaagatc

SEQ ID NO: 4115 - DNA, 76 bp, homo sapiens
agatgtataactttttaatctgttaaagggtagttactagaaaaatagaaacagatgtataacttctttaatctgt

SEQ ID NO: 4116 - DNA, 124 bp, homo sapiens
tctcactctgtcacccaggctggagtgcagtgacacgactcgtggggtccttatccacagggttaggtttttttttttttgagacatctcactctgtcacccaggccggagtgcagtgacacga

SEQ ID NO: 4117 - DNA, 116 bp, homo sapiens
gttctagaagagggcagaggggaagggcactcggggggggacagcacagcctggcaggaggaacaggcgtagctggctggggcagttctagaagagggcagaggggaagggcactc

SEQ ID NO: 4118 - DNA, 114 bp, homo sapiens
cacttggtcaaggggtatgtctgtctgtctgcctgtctttgtttttttctttctctttctctctctttttctttctttttttttgagcacttggtcaaggggtatgtctgtctg

SEQ ID NO: 4119 - DNA, 118 bp, homo sapiens
gcacatgccttcctcatggaaatcatgcaaacatatattaaaaaaaaaaagacacagtgagcattgggaagaaagggacagagcacatgccttcctcatggaaatcatgcaaacatat

SEQ ID NO: 4120 - DNA, 125 bp, homo sapiens
tggccaacatggtgaaaccccgtctctactaaaaactaccgcgggaggctaaggcgggtggatcacaaggtcaagaaatcaagaccatcctggccaacatggtgaaaccccatctctactaaaaa

SEQ ID NO: 4121 - DNA, 150 bp, homo sapiens
atgcacacacagggcacaggtacacgaaggcacacgtgcacacacagggcacaggtacacgcaggcacatgtacacacaggcacacgtgcacgcaggcacacgcatgcaggcacatgtgcacacacagggcacaggtacccgcaggcaca

SEQ ID NO: 4122 - DNA, 125 bp, homo sapiens
tttttagtagagatggggtttcaccatgttggccaggatggtcttgatttcgtgaccttgtgatccgcctgctttggcctcccaacgtagtttttagtagagatggggttttaccatgttggcca

SEQ ID NO: 4123 - DNA, 115 bp, homo sapiens
tctctactaaaaatacaaaattagcagggtgtggtggtgcgtgcctgtaatcccagctatttgggaggctgaggcagaaaaccctgtctctactaaaagtacaaaattagcaggg

SEQ ID NO: 4124 - DNA, 106 bp, homo sapiens
ttactccccgcatcgcggggggcgcctcgcccccctgcgatgggggtcctaagagccaggggggcaagaggcggttgctattactccccgcatcgcggggggcgcc

SEQ ID NO: 4125 - DNA, 76 bp, homo sapiens
tcccagcacttttgggaagctgaggcaggcggatcacctgaggtcaggagttcccagcactttgggaagctgaggc

SEQ ID NO: 4126 - DNA, 90 bp, homo sapiens
gagtagttgggactacaggcatgcaccactatgcaagtaaccctcctacctcagccatcccgagtagctgggactacaggcatgcaccac

SEQ ID NO: 4127 - DNA, 106 bp, homo sapiens
ggagtagtagcaaccccctttccccccccggctactacgatccacatcgcagggggctgcacacaccccaccgtgatgcggggagtagtagcaaccccctctcccc

SEQ ID NO: 4128 - DNA, 63 bp, homo sapiens
caccatccaatagatagccaccatccagtagatagatagccaccatccaataaccaccatcta

SEQ ID NO: 4129 - DNA, 94 bp, homo sapiens
agtttcaaacaccgacatactgaaaggaacagaagattttttacactttgtggataagtgtagaactcagtttcaaacactgacatactgaaag

SEQ ID NO: 4130 - DNA, 123 bp, homo sapiens
tacttgctctacccaccttataggaaaattattacataattagctacatcttttctccttacctgagttagctaagtggcttataaaaaagtacttgctctacccatcttataggaaaattat

SEQ ID NO: 4131 - DNA, 90 bp, homo sapiens
cattgtttaatgtacctcaattttgagttgagtgtgtgtgtgtatgtgtgtgtacattctgagcagcattgtttaatgtatctcaatttt

SEQ ID NO: 4132 - DNA, 99 bp, homo sapiens
ctgcttgtctaggcaccttatcagcataagcgttgctgtgagagacagaagttggaaagctacctgcttgtctagccaccttatcagcataagcgttgc

SEQ ID NO: 4133 - DNA, 457 bp, homo sapiens
acatcctgctgataggtccattttacagagagctgattggtctgttttgacagggtgctgattggtgtgtttacaatccctgagatagacacaaaagttctccaagtccgcacagagcactgattggtgcatttacaaaccttgagctagacacagggtgcagattggtgtgttacaaaccttgagctagacacagagtgctgattggtgtatttacaatcccttagctagacataaaggttctccaagtccccaccagattagctagatacagagtgctgattggtatatttacaatcccttagctagacataaaggttctccaagtccccaccagattagctagatacagagtgctgattggtgcatttacaagccttgcgctagacacagagtgctgattggtgtatttacaaaccttgagctagacacagagtgctgattggtgtatttacaa

SEQ ID NO: 4134 - DNA, 236 bp, homo sapiens
ttgtaaatacaccagtgagcactctgtgtctacctcaaggtttgtaaatgcaccagtcagcaccctgtgtctagctcaaggtttgtaaatgcaccaatcagcactctgtatctagctaaactggtagggacttggagaacttttatgtctagctcagggattgtaaatgcaccaatcagcaccctgtcaaaacagaccaatcagctctctgtaaaatggaccaatcagcaggatgt

SEQ ID NO: 4135 - DNA, 207 bp, homo sapiens
ctgattggtccattttacagaaggctgattggtccattttacagagtgctgattggtccattttacagcacactgattggcacattttacaaaactctatctagctacagatggctgattggtgcattttacaaacatctagctagctacagagtgctgattggtgcatttttacagagcactgattggtgcattttacaaacctct

SEQ ID NO: 4136 - DNA, 94 bp, homo sapiens
ctcaactcactgtaatcatgttgtcccctcaaaagaaaatttctatacctgctatctcatctttacctcccttaactcactgtaatcatgttgt

SEQ ID NO: 4137 - DNA, 89 bp, homo sapiens
taataggtactaagtaggctttgaagtacaaatttctcataaaacatgtttcagtgtccactaataggtactaaataggctttgaagta

SEQ ID NO: 4138 - DNA, 143 bp, homo sapiens
taaggaaaagtatgcatggaatacaggagatccattagggcgtcccttagtattgtcacgccctgtgattaaggtcaataggaaggaaagtggataggataaggaaaagtatgcatggaatacaggagatcaattagggcgtc

SEQ ID NO: 4139 - DNA, 101 bp, homo sapiens
tatttatattaaggatttaaggattaaatatttataaatataaatatatattatatttacatttatattatattgctatttatattaaggatttaaggatt

SEQ ID NO: 4140 - DNA, 80 bp, homo sapiens
aagaaagatggagcaccgtcacaatattcaaaagagccaagtgtgcaaaagataaagaaagatggagcactgtcacaata

SEQ ID NO: 4141 - DNA, 86 bp, homo sapiens
gagatgagggaggtcatgtaaatatttccattcatagtaaataacatatgttaccttttggagatgagggaggtcatttaaatatt

SEQ ID NO: 4142 - DNA, 76 bp, homo sapiens
ttttcttttaaacctaatttattttaaacctaatttatttattttaaacctaatttattttaaacctaatttattt

SEQ ID NO: 4143 - DNA, 132 bp, homo sapiens
tgcctgttttggtcattcacccacactctattggtgtctgatcaccgcagggatgcctgttttggtcattcacccacattccgttggtggaaagtcaattgcgaggacgcctgctttggctgctcacccaca

SEQ ID NO: 4144 - DNA, 63 bp, homo sapiens
tattaggttaatattttaggttataattgtatttattaatattaggttaatattaggcgtgta

SEQ ID NO: 4145 - DNA, 121 bp, homo sapiens
cacctcagcctccctagtagccaggaccacagataggcaccaccacgtccagctaccttttcttttcttttcttgcacctcagcctccctagtagccaggaccacagatgggcaccaccac

SEQ ID NO: 4146 - DNA, 72 bp, homo sapiens
aaatgaatgaattagaatttgtatcacagttttgccacagttaacagggaaatgaatgaattggaatttgta

SEQ ID NO: 4147 - DNA, 130 bp, homo sapiens
ggaaggaaggaaggaaaagaaaacaggtttaagaccttctcatgacactgtatcctttctcaaaaaaaaaaaaaaaaaagagaaaaggaaggaaggaaggaaggaaaagaaagcaggtttaagaccttct

SEQ ID NO: 4148 - DNA, 127 bp, homo sapiens
ctatggtttaaagtaactataaagtaactataacaaagtaactatatgttacttatgtattagttatttaaagttaaactaactttaaactatggtttaaagtaactataaagtaactatatcaaag

SEQ ID NO: 4149 - DNA, 83 bp, homo sapiens
tcatagcacattagccttggaagggacccacagtcaaagttctctgtgtatatcaatcaatcagagcacattagccttggaag

SEQ ID NO: 4150 - DNA, 110 bp, homo sapiens
aaattataaaacttagatttaaacccagatttaaacctactccaatctataaatctataaaatttataaatttataaaatttgtaaatctataaaacttagatttaaacc

SEQ ID NO: 4151 - DNA, 106 bp, homo sapiens
attttaacatatgctgaaagaagtatatgtgtgtgtatgtttaactcttaatttattaagttattattgttaccatttttacattttagcatatgctgaaagaagt

SEQ ID NO: 4152 - DNA, 135 bp, homo sapiens
cacaatatttcataaataaaccatgcctttggtataagtattttaacttctggttggatctttttaaatagtgtcaatactctagggaaggcacaatatttcataaataaaccatgcctttggtataagtatttt

SEQ ID NO: 4153 - DNA, 152 bp, homo sapiens
taggctgattccgatttatggttccaattacaattctttagaaaattccttagaaaacccaaatacaattctttagaaaatccaccacttccagcaataagttacgtaggctgatttcgatttatggttccaattacaattctttagaaaat

SEQ ID NO: 4154 - DNA, 81 bp, homo sapiens
catcaccttattgaaaagaatatcaatagtatcagaagaggtttttgtgtgcttgttgcacaccttattgaaaagaatatc

SEQ ID NO: 4155 - DNA, 95 bp, homo sapiens
cagcagagaggagaccctggagtggaaagctcctctccacagctggctgtgctgttgtcccttcagctctcagcagagaggagaccctggggtgg

SEQ ID NO: 4156 - DNA, 95 bp, homo sapiens
agagagagaatatgtatttgagaaaaagagagagagagaataagtatctgagatagagagagagagacaaagagagagagagaatatgtatctga

SEQ ID NO: 4157 - DNA, 101 bp, homo sapiens
ttttcctttcaatggaactcactaaaaaacattaaaaaaaaaaaaaactctaaaaaactccttctgcctctcccattcttttcctttcaaaggaactcact

SEQ ID NO: 4158 - DNA, 109 bp, homo sapiens
aaaacctgggaatcaacagacgcattttctctaagatatctgctgctcaccaaattacattcacttactatggttttactttaaaacctgggaatcaacagatgcattt

SEQ ID NO: 4159 - DNA, 91 bp, homo sapiens
ctattcagaaatctgtttaaactgactatgtatatatatttttatgcaacttttaatcactgtctatttagaaatctgtttaaactgacta

SEQ ID NO: 4160 - DNA, 140 bp, homo sapiens
gtctacctagaggattgtaaatgcaccattcagtgctctgtgtctagctaaaggattgtaaaagcaccaatcagcactctgtaaaaacgcaccaatcagcactctgcgtctagctaaaggattgtaaacgcaccaatcag

SEQ ID NO: 4161 - DNA, 109 bp, homo sapiens
ttggccatttatatgtcttctttggaaaaaaaatgtctgttgaggtcctttgctcatttttatgtctcttatggtcctttggccatttgtatgtcttctttggaaaaaa

SEQ ID NO: 4162 - DNA, 75 bp, homo sapiens
taacatatgtatcacataaaatatatatgttttggttaacatacgtatcaaataacatatgtatcaaataaaata

SEQ ID NO: 4163 - DNA, 111 bp, homo sapiens
aagattggatcctccaatggtcacaaactgacttgtagcagttccaagcattatgtatgtttatgcataacaaattgcagagacaaaggttggatcctccaatggtcacaa

SEQ ID NO: 4164 - DNA, 118 bp, homo sapiens
attaatggtttgattactgtatataagaaaaagaaacctcataacctcaaaataaagacacatatgccaaggagaagggcaatattaatggtctgattactgtatataagaaaaagaa

SEQ ID NO: 4165 - DNA, 108 bp, homo sapiens
caccaatcggcactctgtatctagctcaaggtttgtaaacacaccaatcagcaccctgtgtttagctcaaggtttgtgaatgcaccaatggacactctgtatctagct

SEQ ID NO: 4166 - DNA, 93 bp, homo sapiens
tttccacataacaatcttataattacttattaatgtagtaccttagaattataaaaataagtttaatctttccatataacaatcttataatta

SEQ ID NO: 4167 - DNA, 89 bp, homo sapiens
caacctacttcagttagaattgtctaatactgctctattaatcaggtttctagcctctacaacctacttcagttaaaattgtctaatac

SEQ ID NO: 4168 - DNA, 81 bp, homo sapiens
atatataactacaggaaaattatacatagtataatataatatatataagtaatatgtatatattactacaggaaaattata

SEQ ID NO: 4169 - DNA, 102 bp, homo sapiens
tgctcaggcctcagctgagaggagacccacagtgtgtagctccactctacaggcagtctgtcctgatgtcttgctcagccctcagctgagaggagacccaca

SEQ ID NO: 4170 - DNA, 148 bp, homo sapiens
agacagggttttaccatattggccaggctggtctagaactcctgacctcccacgtagctgggactacaggcaccctgataatttttgtatttttagtagagacagggttttaccatattggccaggctggtctagaactcctgacctc

SEQ ID NO: 4171 - DNA, 98 bp, homo sapiens
actcatcaggatgacctgcctgcagaaaagagctacccactatgggtctcctctccactgagagctggacactcatcaggatgacctacctgcagaaa

SEQ ID NO: 4172 - DNA, 73 bp, homo sapiens
gacacaaaggttctccaagtccccactagattagctagatacagagtgtggacacaaaggttctccaagtccc

SEQ ID NO: 4173 - DNA, 100 bp, homo sapiens
aaagagtagttaataaactttcccaaataattttccagttctggttcaattcccattccccactccatgagatcaacaaagagtagttaacaaactttcc

SEQ ID NO: 4174 - DNA, 108 bp, homo sapiens
gctaaacatttaagacagataaatagcaatcacggtccaggataaaaattcaaaataatacaaaataataattattttgaatggctaaacatttaaaacagataaata

SEQ ID NO: 4175 - DNA, 78 bp, homo sapiens
attccctctttaacttcttccttgaaccagtgattgctcgaagacattttctaattccctctttaatttcttccttga

SEQ ID NO: 4176 - DNA, 90 bp, homo sapiens
tttacaaacctttagctagacacagagtgctgcttggtgcatttttacagagtgctggttggtgtgtttacaaacctttagctagacaga

SEQ ID NO: 4177 - DNA, 111 bp, homo sapiens
atgaagcagcagaaacacctcttgcccaataacccacaatggtgcagcccctggaccctgctgattggaatagttgtgctcaccgatgcagcagcagaaacacctcttgcc

SEQ ID NO: 4178 - DNA, 75 bp, homo sapiens
ctacctacctaccatagtggttaatatgttaaataggtagtaggtaccatactacctacctaccatagtggttaa

SEQ ID NO: 4179 - DNA, 97 bp, homo sapiens
gaaatgaaagacacatttaaggaattaggaaatgcagtggaaagctgtaacaatagactaaccaagaagaagaaagaaagacacatttaaggaatta

SEQ ID NO: 4180 - DNA, 75 bp, homo sapiens
agaaggtgaaaaaacacagaattggcaaagtgaccccaaagatcattgctgcagaaggtgaaaagacacagaatt

SEQ ID NO: 4181 - DNA, 89 bp, homo sapiens
ttgcatttgcatattaaaggttgccagccggccatgttgggtggatccagtttctaacggtttgcatttgcatatcaaaggttgccagc

SEQ ID NO: 4182 - DNA, 94 bp, homo sapiens
atatgcttgcatagcttgaaatgcccttttgcagtcttgaggcctttcttacatatctgtctgcacacttcatatgcctgcatagcttgaaatg

SEQ ID NO: 4183 - DNA, 90 bp, homo sapiens
ttagtgatgctaaatatcatcagagtgatgaaacttgatcaaagtgattttggtccattacttagtgatgctaaatttcatcagagtgat

SEQ ID NO: 4184 - DNA, 84 bp, homo sapiens
cctaaatgctaagttattgaaaaattttttttctagttttaaacattgtttcatagttatcctaaatgctaagttattgaaaaa

SEQ ID NO: 4185 - DNA, 92 bp, homo sapiens
gggggtatatgaccctaaattagtgctaaatatatatctaaatatatatatatgtatgtcttttgggggtatatgaccctaaattcgtgcta

SEQ ID NO: 4186 - DNA, 103 bp, homo sapiens
ccagggaagagcccggatgctgctcctttcccgccccggaccggcgcaggtccatccagaggcgcgaagcctgcaggccagggaagagcccggatgctgctcc

SEQ ID NO: 4187 - DNA, 93 bp, homo sapiens
ctgtttatagtgtagtgtctacactcagtaacttatttgttgaataaatgaatgggttcccctgtttatagtatagtgtctacactcagtaac

SEQ ID NO: 4188 - DNA, 258 bp, homo sapiens
ctcacctcccggatggggcggctggccaggcggggggctgatccccccacctccctcccggacggggcggctggccgggcggggggctgaccccccccacctccctcccggacggggcggctggccgggcagaggggctcctcacttcccagtaggggcggccgggcagaggcgcccctcacctcccggacggggcggctggccgggcggggggctgacccccaccacctccctccaggacggggcggctggccgggc

SEQ ID NO: 4189 - DNA, 238 bp, homo sapiens
caccaatcagcgctctgtgtctagctaaaggtttgtaaacacaccaatcagcactcagtaaaaacgcaccaatcagtgctctgtgtctagctaattgggtggggacctgaataacttttctgtctagctagaggattgtaaacacaccaatcagcgctctgtgtctagctaaaggtttgtaaatgcaccaatcagcactctgtaaaaacgcaccaatcagcattctgtgtctagccaa

SEQ ID NO: 4190 - DNA, 114 bp, homo sapiens
tccaattctgaggtaaaatattatttattaatattattaatatacatgaataatataaaagaagtgactaccagtatatccaattctgaggtaaaatattattttattaatatt

SEQ ID NO: 4191 - DNA, 105 bp, homo sapiens
gccctggtataagctacaggccagattttgtgtcttcagccaaggacagtttcaggcttgtgtgaaggccctgctataagctacaggccagattttgtgtcttca

SEQ ID NO: 4192 - DNA, 103 bp, homo sapiens
ttcaagccttagatttaagtccttacctaagccaatgtctagaagagtttttccgatgttatcttgtagaatttttcttcaagccttagacttaagtccttac

SEQ ID NO: 4193 - DNA, 128 bp, homo sapiens
gacttagtctcgacaagttcaaaactgagggtctcatcgctgtcccaccccagcctgcccgatcgaggtcacacaggactttccacaagggacttagtctcaacaagttcaaaactgagggtctcatc

SEQ ID NO: 4194 - DNA, 113 bp, homo sapiens
tatatattattttatggtattagtataaaatagtattttatggtattagtataaaatagtatttttagtatacttttatgctaatagtatatttttatactattagtataaaa

SEQ ID NO: 4195 - DNA, 111 bp, homo sapiens
accagtaaaatatctcacattgagatacatgaaaatatctaccagtaaaatagctaccagtaaaatatctcacattgaacatactctcacattgaacacatctcacattga

SEQ ID NO: 4196 - DNA, 113 bp, homo sapiens
gcaccaatcagtgctctgtgtctggctaaaggtttgtaaatgcaccaatcagcactctgtaaaaacggaccaatcagcactctgtaaaatggaccaatcagcactctgtaaaa

SEQ ID NO: 4197 - DNA, 106 bp, homo sapiens
ttaatttctccagcatgcataaaatagatgccccttacttttgggtggctgtgggagtgttactctgttatcttaatttctccagtatgcataaaatagatgcccc

SEQ ID NO: 4198 - DNA, 106 bp, homo sapiens
aaaatttaaaagtcataataggacaactactgtacgattccatacagtatttaaaaaatttttaggtttaaaaaaatttaaaagtcataataggacaaatactgta

SEQ ID NO: 4199 - DNA, 125 bp, homo sapiens
ataaatgtccattaaatcttcacaatttatgttcagagactgcagtaaagacaggcataagaaattataaaagtattaatttggggaactaataaatgtccatgaaatcttcacaatttatgttc

SEQ ID NO: 4200 - DNA, 100 bp, homo sapiens
tgtgtgtgtacacacaatggaatccaagtatccatggacaggctgaatggataagcaaaatctagtgtgtgtgtgtatgtgtgtgtacacacaatggaat

SEQ ID NO: 4201 - DNA, 152 bp, homo sapiens
aagaatgaattattgataattaggttaatgtccttttaaaaactttattttaaaatatttttattacaggaaataaattatagcagtaaattatacaattagaagaatgaattattgataattaggttaatgttcttttaaaaactttattt

SEQ ID NO: 4202 - DNA, 140 bp, homo sapiens
agtaattttgaaagagcatgtcttccttcttttgcttggttcagagaaatttaataggccagttttgactttagccaaccttcgtccagtaattttgaaagagcatgtcttccttcttttgcttggtgcagagaaattta

SEQ ID NO: 4203 - DNA, 82 bp, homo sapiens
acaacaataaaattcagactgacctagactaacaacacatcaaatcataaaattacaactataaaattcagactgacctaga

SEQ ID NO: 4204 - DNA, 91 bp, homo sapiens
acttgccccttccccagaaaagcagagaaggggtagagacacggagagaggagagtaggggttgaggaacttgcccctcccccagaaaagc

SEQ ID NO: 4205 - DNA, 74 bp, homo sapiens
tcttttaatttctaatgaaatgtccatatcaggagttctttaatttaaatttcttttaatttctaaatgaaatg

SEQ ID NO: 4206 - DNA, 71 bp, homo sapiens
aggaataggatcttactctttctacatataaggactttgggagaaaaaggaataggaataggatcttactc

SEQ ID NO: 4207 - DNA, 82 bp, homo sapiens
agaatgaagtattcctttatttcttcttaaggaaatacgtctaagcataacattgagaaagaatgaggtattcctttatttc

SEQ ID NO: 4208 - DNA, 104 bp, homo sapiens
caccaatcagcgctctgtgtctagctcattggatggggacttggagaacttttctgtctagctaaaggattgtaaacacaccaatcagcactctgtgtctagct

SEQ ID NO: 4209 - DNA, 114 bp, homo sapiens
gtccctggaccctgctgatcggaatagttgtgctcactgacgcagcagcagaaacaccccttgcccaagaacccgcagtggtccctggaccctgctgatgggaatagttgtgct

SEQ ID NO: 4210 - DNA, 71 bp, homo sapiens
acaccttaaattagttattattagttataaggtgtgttaaaacttaacacactttaaattagttattatta

SEQ ID NO: 4211 - DNA, 136 bp, homo sapiens
gctaacattttccaggtaccctaaaattactaagaacttggtccatatctgttgacactcctagaatattaaaacaatacacaagaaggcctcaaatgctaacattttccaggtaccctaaaattactaacaactt

SEQ ID NO: 4212 - DNA, 158 bp, homo sapiens
caccaatcggcactctgtatctagctcaaggtttgtaagcacaccaatcagcaccctgtgtctagctcagggtttgtgaatgcaccaatcgacactctgtatctagctactctggtggggccttggagaacctttgtgtccacactctgtatctagct

SEQ ID NO: 4213 - DNA, 110 bp, homo sapiens
ttattgacacattctcgaaaacctggacccttgcctgtcctcctagaccacaaagaggactgagcaaaattgtatttaatggcccttactgacacattctcgaaaacctg

SEQ ID NO: 4214 - DNA, 163 bp, homo sapiens
cacctccttcagtgattccacatccattccgggtgctgcagactaagggatggatttgcaaaacacctgggtttaaactgtcaggatccaacttgtcttcttccccactcacctccttcagtgattccacatccattccgggtgctgcagactaagggatgga

SEQ ID NO: 4215 - DNA, 126 bp, homo sapiens
ataaaactggattctctattacaatccccaaaaatactaatatggctttctaaataatgatttgaaatctttagcagtctaaagatggataaaactggattctctattacaatccccaaaaatact

SEQ ID NO: 4216 - DNA, 101 bp, homo sapiens
agctaaataaattttaaacctctcttctcaaattccccttaaagatatctctaacagtttgtattctctttgtgttcaagctaaataaattttaaacatct

SEQ ID NO: 4217 - DNA, 175 bp, homo sapiens
tggtccatttacagagtgctgattggtccgtttttacagagtgctgactggtgcgtttacaaacctttagccagacacagagtgctgattggtgcatctacaatcctttagcttgacagaaaagttctccaagtccccacccgattagccagacacagagtgctaattggtgcat

SEQ ID NO: 4218 - DNA, 89 bp, homo sapiens
ttgtatttttagtagagatggggttttaccatgtaggccagtgccaccacgcccagctaatttttgtatttttagtagagatggagttt

SEQ ID NO: 4219 - DNA, 110 bp, homo sapiens
aattgggagaatggggaaagttggggggttgtaacagagacaaatcttcgttataagtttatcagaaaatgatgatgttatcgaattgggagaatggggaaagttgtggg

SEQ ID NO: 4220 - DNA, 80 bp, homo sapiens
cgcgatctcggctcactgcaagctccgcctcccgcccaggctagagtgcagtgccgcgatctcggctcactgcaagctcc

SEQ ID NO: 4221 - DNA, 71 bp, homo sapiens
tattttatttaacctgtcagcaatatttattttattttattaaataaatattttatttaacctgtcaacaa

SEQ ID NO: 4222 - DNA, 125 bp, homo sapiens
tggctaaagattaacaaccagctggtgttaatttgcttacacttcagcctgagacccattcctaggtaagtaactgaattggggtttgtcttggctaaagattaacaaccagctggtgttaattt

SEQ ID NO: 4223 - DNA, 80 bp, homo sapiens
tctatgctggtggctctaccacctgatgaagagactctaaacagtcataaattgttatctatgctggtggctctactacc

SEQ ID NO: 4224 - DNA, 107 bp, homo sapiens
tctgattggttgtggaaagcaaccaatcagaggctgaagtgaagttacaaaggtcacattcctacgcaaacatctgattggttgtggaaagcaaccaatcagaggct

SEQ ID NO: 4225 - DNA, 111 bp, homo sapiens
acaccaatcagcactctgtctagctaaaggtttgtaaacgcaccaatcagctctctgtcaaaacggaccaatcagcactctgtaaaacagaccaatcagctctctgtaaaa

SEQ ID NO: 4226 - DNA, 88 bp, homo sapiens
aaatactttaagaaaccctgtgttaaaaccctgtgttaaaactctgtatttaaaacagttaaatactttaagaaaccctgtgttaaaa

SEQ ID NO: 4227 - DNA, 158 bp, homo sapiens
actccatatgttggctattctgaatagtgctgcaataaacatggggatgcaggtatctctctgacatactgattttatttcctttggataaatgcccagtaggtttactccatatcttggctattctgaatagtgctgcaataaacatggggatgcag

SEQ ID NO: 4228 - DNA, 84 bp, homo sapiens
atttgcagaggaaatattttaaaatttaaaatttttaatttttaatttaaattttaaatttgaagaggaaatattttaaaattt

SEQ ID NO: 4229 - DNA, 105 bp, homo sapiens
agaagtcaattacttcttattacttcttatatttcaattacttcttatatttcaattacaatcaattgaaatataagaagtaatattcaattacttcttatattt

SEQ ID NO: 4230 - DNA, 93 bp, homo sapiens
cagctctcagcagagatgagaccatggagtaggtagctcctctccacagctgattgttgtgttgtcttcccagctctcagcagagaggagacc

SEQ ID NO: 4231 - DNA, 116 bp, homo sapiens
agactgtctcaaaaaacaaaaataaaaacaaaagaaggaggcaatgtcaggcaagggcagagcagcaggaatgatggtgaaacagacaagactgtctcaaaaaacaaaataaaaaa

SEQ ID NO: 4232 - DNA, 95 bp, homo sapiens
aaataggtgaattgctcatttcaaaattattttgaaactctgtctcaaaataaaaaagaaatatatgaaaaataggagaattgctcatttcaaaa

SEQ ID NO: 4233 - DNA, 74 bp, homo sapiens
catggggctcaagggctgagcaaatctgaacagcaggcagtggacgtagtcatggggctcaagggcggagcaaa

SEQ ID NO: 4234 - DNA, 139 bp, homo sapiens
agagagaaagaaagaaggaaagaagtgctattgccactctgagtgaaacttggtcaaaaaacaaaaaaagaaagaaagaaagagagagagagaagaaagagagagaaagaaagaaggaaagaagtgctactgccactct

SEQ ID NO: 4235 - DNA, 93 bp, homo sapiens
tgctggctaaatctgtgacaatttagtcttgaaataaataatgatagcaacaggcaaagggacactcctgctggctaaatctgggacaattta

SEQ ID NO: 4236 - DNA, 84 bp, homo sapiens
aaaagagcacagccctgaagccatccttgtcccttgtctaaccttgcggacatggcttgaaaagagcacagccccgaagccatc

SEQ ID NO: 4237 - DNA, 65 bp, homo sapiens
gctcctcacttcccagacggggcggctgccgggcggaggggctcctcacttctcagacggggcgg

SEQ ID NO: 4238 - DNA, 105 bp, homo sapiens
gtgccctgccctgggagtgtccagttcgggggttccctggcctgggggtgccctgtctgggaggtgctctgcctggagggtgccctgcccggggagtgtccagtt

SEQ ID NO: 4239 - DNA, 89 bp, homo sapiens
gaaaggaccctcttccccagagcgcagcttcctgtcagggggtgaccgggtgctcatgaaaggaccctcttccccagagcacagcttcc

SEQ ID NO: 4240 - DNA, 124 bp, homo sapiens
aacataaattgtgaagatttcatggacatttattagttccccaaattaatacttttataatttcttatgcctgtctttactgcaatctctgaacataaattgtgaagatttcatggacacttat

SEQ ID NO: 4241 - DNA, 103 bp, homo sapiens
tattggtctaaaattctctttttttgttgtatagtattttgttgaggatttttgcatcgatgttcatcagggatattggtctaaaattctctttttttgttgt

SEQ ID NO: 4242 - DNA, 82 bp, homo sapiens
gaaataaaggaatacctcattctttctcaatgttatgcttagaggtatttccttaagaagaaataaaggaatacttcattct

SEQ ID NO: 4243 - DNA, 102 bp, homo sapiens
catttctccaaaaaagatatacaaatggccaataaagttgaaaatgggcaaataatctaaataggcatttctccaaaaaagatatacaaatggccaataaag

SEQ ID NO: 4244 - DNA, 132 bp, homo sapiens
tagctgcatgaacagaaaagatgtaaataaaatgcctggccttgagcaaggagtgcccgggtgtatttgaggatgagaaccgcactcataaagcttagctgcatgaacagaaaagatgtaaataaagtgcct

SEQ ID NO: 4245 - DNA, 100 bp, homo sapiens
aactgcaggaacattgagagaataattgctggattagaactttggtgttaatagtgctatcatagcatattccaactgcaggagcattgagagaataatt

SEQ ID NO: 4246 - DNA, 135 bp, homo sapiens
atgtccatattaaaatgaaatcttcacaatttatgttcagagattgaagtaaagacaggcataagaaatcataaaagtattatttgggaactgatatatgtccatattaagatgaaatcttcacaatttatgttc

SEQ ID NO: 4247 - DNA, 81 bp, homo sapiens
ggggtttcaccatgttagccaggatggtctcgatcgcatttttttttttagtagagatggggtttcaccatgttggccagg

SEQ ID NO: 4248 - DNA, 87 bp, homo sapiens
aattagataaattagatgaaatagaagtcttctgctcacttttaactgtatttctttgtttaattagattaattaatttttatctaa

SEQ ID NO: 4249 - DNA, 83 bp, homo sapiens
ttaaataacatgctcttaaataacatggtcttaataattattcatatttaataattaaaattaaataacatgctgttaaaaaa

SEQ ID NO: 4250 - DNA, 143 bp, homo sapiens
agatagttccaagagacggcagttccaagactttctagttgaaagtctgcttagaattctgcttagaattctgagattgtagagtatgggagaaattaagatagttccaagagatggcagttccaagactttctagttgaaag

SEQ ID NO: 4251 - DNA, 80 bp, homo sapiens
aagacacatactgggccaggcacagtgctcattttgcaataagcaaaagagtaaatgaagacacatactgggccaggtac

SEQ ID NO: 4252 - DNA, 117 bp, homo sapiens
ctttcaaatatctgaaaagcctttccaagaagaatggagcctcctaaaacagatacaacttagatcacaacacccaagggctttcaaatatcggaaaagcctttccaagaagaatgg

SEQ ID NO: 4253 - DNA, 540 bp, homo sapiens
agcctctcaaggcccagctcctgcctttcgttggcatctctaggcccagctgctgcccccaggtggcctctacaggctgtgctctttcttctgactgtgtctggaggtccaactcctgcctcagaacaacctcttttggctcagctcctgcccagctcctactggcctttgtaggccccaaactgcctcaagtcaagctttccaggcccaccttctgcctcccaatggcctggacaggcccagctcctgcgtgacaatggcctctccaggcccagcttttgcctcacagaggccttccccaaacaaggtcctacctgcctcccagcagcctcaacaggcccagatcctgcctcacactaatctcattaggaccagctcatgcctcacggtggcctctccaggcccagctcctgccccccgacaggctgtccgtgccggaaacttcctcaagtcggcctctccaggcacagctcctgcatcccagcagcttctctagaccgagaactttctcaagtctgccattccaggcccaacttgtgc

SEQ ID NO: 4254 - DNA, 211 bp, homo sapiens
cagccccctaggccaagctcctgcctttcagcagcctctacaggccccactcctgcctcaatggcctctctagggcaagcttatgcctcacagtggccattctggcccagcttttgccttttggcagcatctccagacccagaacttcctcaagtgggcctctccaggtccagctcttcctcccggctgcatctccaggcccacctcctac

SEQ ID NO: 4255 - DNA, 721 bp, homo sapiens
ggttgagcaatatgtcacaatcccttctgtatgtagaacccaggctgcaagaagagtcacattacctaggtgctgagcctggcaatatgtcacaatgctccctgctagcggggcccaggaaagagcacagagtcataccacatacctgactggcccagaaatttgtcataatcttcactgggacagaacacaggaagaaaaggagagtcacattacctaggttataggcccagtgatatgtcacagtccctactgagaccagggtccagaaatgagagaaaagccataccacttctgtgatgtgcccagagataggtcacaatgacccctttgggcttgcccacacaggcgatgagagtcacatcacttaggtaataaacccagagacatatcacaatttcccctgaaggcagggaaaatttcccagagtcatgtcacaatttcccctgaagacaggagagtcacaccacctaggttcttggcccagcaatatgtcacaatcccttctaagtgcacaagcagcgaagaagagtcacataacttaggtattgggcccagcaatatgtcacaattcccaatggaggccaagatgaggcaagaaagtagagtcacatcacataggtgaaaagtccaaagatatgttacaatgcaccctgtggtaaggcccaggctggagagttacatcacctaggtacttgatccaggtatatgtcacagtccc

SEQ ID NO: 4256 - DNA, 142 bp, homo sapiens
tacaaaaagagggtttcaaaactgctctatcaaaagaaaggttcaatttcgttttccaacataggcctcaaagaaaccaaatatccacttgcagattttacaaaaagagtgtttcaaaactgctctatcaaaagaaaggttc

SEQ ID NO: 4257 - DNA, 96 bp, homo sapiens
tcttttcattcagcagtttggaaaaagtaatctctttgtgatgtgtgcattcacctcgtgaacttctaactttcttttcattcagcagtttagaaa

SEQ ID NO: 4258 - DNA, 103 bp, homo sapiens
ggcctcccaaagtgctgagattacaggtgtgagtcaccgtgccaggcccaagatgtgatccgcctgcctcggcctcccaaagtgctgggattacaggtgtgag

SEQ ID NO: 4259 - DNA, 117 bp, homo sapiens
aggattacaggtatgagtcactgcgcccagactggtctcaaattctgggcctcaagtgttccccctgccttggcctcccaaagtgcaaggattacaggtatgagtcactgcgcccag

SEQ ID NO: 4260 - DNA, 118 bp, homo sapiens
gtaacatatgtaacatatctcttctcccagaaggaccctttctgggtccgtgggggtggggtaagacattctcttgtaacaaatgtaacatatgtaacatatctcttctcccagaagg

SEQ ID NO: 4261 - DNA, 143 bp, homo sapiens
ttttgcaatctatccatctgacaaagggctaatatccagaatctataagaaacaaacaaatttaccagaaaaaactaaacaaacagaatgagagaaaatttttgcaatctatccatctgacaaaaggctaatatccagaatct

SEQ ID NO: 4262 - DNA, 129 bp, homo sapiens
ttcagaccctaattggtcccaggccaaggtcccaggccaagctttcacttcagcttctaataggtcctgggccaagctaagcagcatctatatatcatcatttcagcttctaattggtcctgggccaag

SEQ ID NO: 4263 - DNA, 171 bp, homo sapiens
agcattgtgacatattgctgggcccagaacaaaggtgatttgagtctcttacctagaccctgattacagggacattgtgacatatctctgggtccatcaactatttgatgtgactctcctctgttccctggcctttgcctatagaagacattgtgacatatctctgggccc

SEQ ID NO: 4264 - DNA, 81 bp, homo sapiens
ataatgctaaggaattccatttttgtgtatgtgcatgtcttccctagaaagttatgttataatggtaaggaattccatttt

SEQ ID NO: 4265 - DNA, 87 bp, homo sapiens
gtgactagagcagggctgttgtctcctcaagcttcagccgtgtgtggactggtcagcttccggagtgaccagagcagggctgttgtc

SEQ ID NO: 4266 - DNA, 160 bp, homo sapiens
aaataaataaatttcctgttttaatttctaatgtgataaatataataggtatgtgccactgcactccagcctgggtgacagagggagattccatctcaaaaaaagtaaaaataaataaatttcctgttgtaatttctaatgtgataaatataataggtat

SEQ ID NO: 4267 - DNA, 102 bp, homo sapiens
ctcccaaagtgttgagattacaggcatgttacccaggataatctcgatctcctgacctcatgatccgcctgccttggcctcccaaagtgctgagattacagg

SEQ ID NO: 4268 - DNA, 103 bp, homo sapiens
gcctcccaaagtgctgggattacactatgttgcctgggctggtctcgaacccctggcctcaagtgatcctcccacctcggcctcccaaagtgttgggattaca

SEQ ID NO: 4269 - DNA, 73 bp, homo sapiens
ctgtttcttacttctgcctcagaggctggaccctgtcagaggctggaccctgcttcttacttctgcctcagag

SEQ ID NO: 4270 - DNA, 258 bp, homo sapiens
gtaatcccagcactttgggaggctgaggcaggtggatctcctgaggtcaagagtttgagacctggccaggcatggtggctcactcttgtaatcccagcactttgggaggctgaggcaggcggatcatgaggtcaggagttcgagaccagcctggtcaacacagtgaaaccccgtctctactaaaaatataaaaattagctgggcatggaggcgggtgcctgtaatcccagctactggggaggctgaggcatgagaatt

SEQ ID NO: 4271 - DNA, 106 bp, homo sapiens
tatataattagaattagaatataattttaactaattattctgatataattatatattattagtataatatataattagaattagaatataatattaactaattatt

SEQ ID NO: 4272 - DNA, 79 bp, homo sapiens
gtattgactagaattccttattggacttccttgagtgtagcatctcagacatctagtattggctagaattccttattgg

SEQ ID NO: 4273 - DNA, 73 bp, homo sapiens
aaggccaaacccattctcatttatagctcctgtttcctgagtttctaggaaggccaaacccattctcatttga

SEQ ID NO: 4274 - DNA, 102 bp, homo sapiens
aatattttccttctttccttccttccttccttcctccctccctttctccttccttccttcctctctctctcctttccttccttccttccttccttcctttct

SEQ ID NO: 4275 - DNA, 103 bp, homo sapiens
ttgacctggttgggaccaactcaaggtcatgcccccaagaatgtaacatcactatgctagcactggttgacctggttgggaccaactcaaggtcaggccccca

SEQ ID NO: 4276 - DNA, 95 bp, homo sapiens
ttgctggtaggttaagatcacgtgactgagttctaacccaggaggatttgtagtaggtaggttgagatctttgctggtaggttgagatcacgtga

SEQ ID NO: 4277 - DNA, 144 bp, homo sapiens
tgcctcttaaggagagctgagtatttgagctggtggtctgtgtacttctggggcttgcactgtggtttcatgcatctgtgccttggattgggacctgagagtgcctcttaaggagagctgagtatttgagctagtggtctgtgt

SEQ ID NO: 4278 - DNA, 79 bp, homo sapiens
taagagctgtaaacgtgagaagcccagataatgaaaattatcaatagtgtgataagagctgtaaacgtgggaagcccag

SEQ ID NO: 4279 - DNA, 107 bp, homo sapiens
caagaggatttacatttttgactgcatcattgagaactgaactctcaattctacatactgtagtgtggaatgaattcctagaacaaaaggatttacatttttgactg

SEQ ID NO: 4280 - DNA, 80 bp, homo sapiens
aaaccatcttcactgtttctgtctaaattttctgccccatggggaaatttggtcagaaaccatcttcactgtttctgttc

SEQ ID NO: 4281 - DNA, 90 bp, homo sapiens
attctgttgaggggcattaaatgattaattaatcattaaacgttataacagatggggaatataggtaattctgttgaggggcatgaaatg

SEQ ID NO: 4282 - DNA, 101 bp, homo sapiens
tagatttttctgtgaagagtgtgtgtgtgtgtgtgtgtgtgtgtgtgtgcgcgcgcctgtgtgtgtgtttaaattagatttttctgtgaagagtgtgtgtg

SEQ ID NO: 4283 - DNA, 80 bp, homo sapiens; identical to SEQ ID NO: 4251

SEQ ID NO: 4284 - DNA, 117 bp, homo sapiens; identical to SEQ ID NO: 4252

SEQ ID NO: 4285 - DNA, 77 bp, homo sapiens
atgcttttagctcaatgtgtaaacatctgtgactggtattttctttctgtttggatgcttttagctcaatgtgtaaa

SEQ ID NO: 4286 - DNA, 115 bp, homo sapiens
tgagccaagattgcaccactgcactccagcctgggcgacagaatgagacactgtctcaaaaaaaagaaagaaagaaagaaaagattttgagccaagatcgcaccactgcactcca

SEQ ID NO: 4287 - DNA, 108 bp, homo sapiens
tgggaagtagggggtgcagccatcatgccgcgtccacaggggaagtggcagggaggcgcaactgcggtgccgcattcaaatgggaagtgggggtgcagccatcatgcc

SEQ ID NO: 4288 - DNA, 97 bp, homo sapiens
taacttcacttcagcttctgattggtcactttctgcaatcaatcagaagtttgcatagggtgtaactttataacttcacttcagcctctgattggtc

SEQ ID NO: 4289 - DNA, 129 bp, homo sapiens
gaatgccattaattcattcctttttatggctgagtagtattccatctcatatatatatatatatatatatatatatatgctgtgaatggcattaattcattcctttttatggctgagtagtattccatc

SEQ ID NO: 4290 - DNA, 114 bp, homo sapiens
cttaagaagtccatggggaaatcttcacgtaactatccaggagccaggagaagaggcatttaaaaataataagacttaatattttcgcttaagaagtccatggggaaaccttca

SEQ ID NO: 4291 - DNA, 63 bp, homo sapiens
tcaatatttacataaaaatatatcatctcaatatttacataaaatatttacatatatatcaat

SEQ ID NO: 4292 - DNA, 121 bp, homo sapiens
acgcctgtaatcccagcattttgggaggctgatggtggtggatcacctgaggtcaagagttcgagaccagtggctgggcgcggaggctcacgcctgtaatcccagcatttgggaggctgag

SEQ ID NO: 4293 - DNA, 74 bp, homo sapiens
cagattagctagatacagagtgtccacacaaaggttctccaagtccccatcagaatagctagatacagagtgtc

SEQ ID NO: 4294 - DNA, 74 bp, homo sapiens
tgtatctagctactctggtggggacttggagaacctttgtgtggacactctgtatctagctaatctggtgggga

SEQ ID NO: 4295 - DNA, 97 bp, homo sapiens
tagaatttggagatggagaagatatgaaggatggtgaaaaggggaatttaaaaatatcaatacaagaaagtcattagaatttggagatgaagaagat

SEQ ID NO: 4296 - DNA, 99 bp, homo sapiens
tgggtctcctctctgctgagggttgcagagatgacagaccgacctgcctgcaaataggacctacctaccttgggtctcctctctgctgagggctgcaga

SEQ ID NO: 4297 - DNA, 86 bp, homo sapiens
tgggaatgcggagactcagcacagaaggtcggctggaggcctgggctgcaggtgcctgggttgggaaagcggagactcagcacaga

SEQ ID NO: 4298 - DNA, 75 bp, homo sapiens
aaagtaaattttgccttccatcttccactgagtatctaatagattaatccaaagtaaatgttgccttccatcttc

SEQ ID NO: 4299 - DNA, 148 bp, homo sapiens
tataattatttcattatatattccagtgtaataatagaaataaaatgcacaacaaatgcacaaaataaattcaagaaagtcagagtgaatgagttctataattatttcattatatattccaatgtaataatagaaataaaatgcacaa

SEQ ID NO: 4300 - DNA, 115 bp, homo sapiens
tttgtttaaattctttgtagattctggatattagccctttgtccgatggagttgttttttttttcttgtaactttgtctaaattctttgtagattctggatattagccctttgtc

SEQ ID NO: 4301 - DNA, 108 bp, homo sapiens; identical to SEQ ID NO: 241

SEQ ID NO: 4302 - DNA, 122 bp, homo sapiens
tctacaaccatctgatctttgacaaacctgacaaaaacaagccagacagaacagagaactcagaaataactccatacgtctacaaccatctgatctttgacaaacctgataaaaacaagcca

SEQ ID NO: 4303 - DNA, 106 bp, homo sapiens
ttagctagacacagagtgctgattggtgggtttacaatcctttagctagacggaaaagttctccaagtccccacctgattagctagacacagagcgctgattggtg

SEQ ID NO: 4304 - DNA, 109 bp, homo sapiens
ggtccctggacctgctgatcagaatagttgcactcaccgatgcagcagaagaaacaatccctgcccaagaaccagcaatggtccctggaccctgctgatcagaatagtt

SEQ ID NO: 4305 - DNA, 87 bp, homo sapiens
caagaccatgagcagcagctccccttgctgaaatgaaatgaatttggcagttgaattgagtagcaagaccatgagcagcagctcgcc

SEQ ID NO: 4306 - DNA, 107 bp, homo sapiens
aaaaaatttggaagaaaattaaaaatagcaatacaatgttctacacccaagattcaaccaatcacaggtcaaaaaaatttggaaaaaaattaaaaatagcaatacaa

SEQ ID NO: 4307 - DNA, 81 bp, homo sapiens
aaattcgatttaatctgtaggactccattctcaaagcacagtcactccaaaccgaaattcgatttaatctgtaggactcca

SEQ ID NO: 4308 - DNA, 135 bp, homo sapiens
gccaagccatcatctacaggaaccagcccagcaggccaagccaacatctacaggaaccaacctgacatctacaggaaccaacctgacatctacaggaaccaactcagcaagccaagccatcatctacaggaacca

SEQ ID NO: 4309 - DNA, 119 bp, homo sapiens
acagtaatagtaagagtatgggagatactcttactcttattattactataactataatagtaatactattacagtatagtaatactattacagtaatagtaagagtatgggagatactc

SEQ ID NO: 4310 - DNA, 81 bp, homo sapiens
tcaaaaacagtcaaatattggcaattgtatgtggtccaatctaataatctttttgtaatcaaaaacagtcaaatattagca

SEQ ID NO: 4311 - DNA, 255 bp, homo sapiens
cctctacctcccaggctcaggtgttcctcccacctcagcctccacctcccaggctcaggtgttcctcccacctcaccctccacctcccaggctcaggtgttcctcccacctcagcctcctgagtagctgggactacaggcacacgccaccatgcccggataacttttgtatttttttgtagagacagggttttgccatgttgcctaggctggtctcaaactcctgggctcaagtgatccgcccactttggcctcc

SEQ ID NO: 4312 - DNA, 88 bp, homo sapiens
tctgtgtctagctaaatgtttgtaaatgcaccaatcagcactctgtaaaaacgcaccaatcagtgctctgtgtctaaaggtttgtaaa

SEQ ID NO: 4313 - DNA, 158 bp, homo sapiens
caccaatcggcactctgtatctagctcaaggtttgtaaacacaccaatcagcaccctgtgtctagctcagggtttgtgaatgcaccaatcgacactctgtatctagctactctggtggggccttggagaacctttgtgtccacactctgtatctagct

SEQ ID NO: 4314 - DNA, 113 bp, homo sapiens
ttgtaaaatgcaccaatcagcgccctgtagctagcatcaggattataacatgcaccaatcagagctttgtaaaatgcaccaatcagtgctctgtaaaacgcatcaatcagcag

SEQ ID NO: 4315 - DNA, 244 bp, homo sapiens
ttggatgaagacagatactgagagagaaaatcttgataccttgtgaagagagagtctgcccaggaatggagctaacagggagttaaaaaggacagagagagggagaggcagagagcaggcaagagagagagacagagagagagagagagacagagagagacagagagagagacagagagagacagagacagagacagagagagagagagagagagagagagagagagagagagagagagagaga

SEQ ID NO: 4316 - DNA, 132 bp, homo sapiens
aaccagcatcttgaggttgggcttccagccttcagaactgcaaaaagtggtcatgtgcaagacaggaagagaggcttcagtagaaaccaaccaaaccagcatcttgaggttgggctttcagccttcagaact

SEQ ID NO: 4317 - DNA, 92 bp, homo sapiens
acaccactgcattccagcctgggagacagagtctcgaggcagaggctgcagtgagccaagtttacaccactgcattccagcctgggagacag

SEQ ID NO: 4318 - DNA, 109 bp, homo sapiens
gccagacaccaacggtcggaaaccgccagacaccaacggtcggaaaccgccaagacaccaacgctcggaaaccgccagacaccaacgctcggaaaccgccagacaccaa

SEQ ID NO: 4319 - DNA, 111 bp, homo sapiens
tttgaagaaacctagggactttctcagccatctctctcatgtggcaccaccccagggcctggcagggggctttgtgggtgtggagtttgaagaaacctagggactttctca

SEQ ID NO: 4320 - DNA, 136 bp, homo sapiens
atgtcagaatctcctttattttctatttattttattttattttttcagacagtctcactctgtcaaaattaatccatgttgtagcatgtcagaatctcctttattttctatttattttattttattttttcagaca

SEQ ID NO: 4321 - DNA, 95 bp, homo sapiens
gttgcaggaagcaaccaatcagaggctgaagtgaagttacaatgttacactcctgtgcaaacgtctgattggttgcagaaagcaaccaatcagag

SEQ ID NO: 4322 - DNA, 84 bp, homo sapiens
cattcctatcagtttactgcactgtgctgcgtatctaccgtgtctattttcattgcattcctatcagtttactgcactgtgctg

SEQ ID NO: 4323 - DNA, 92 bp, homo sapiens
gcctcccaaagtgctgggattacaggcgtgagccatcccgtctagcctcaagtgatcctcctgactcggcctcccaaagtgctgggattaca

SEQ ID NO: 4324 - DNA, 113 bp, homo sapiens
ctgcttcacaccatccagacacacctgcatggaggcactttctttttttctttttcttttttttttttgtagagacagggtcccactgcttcacactatccagacacacctgc

SEQ ID NO: 4325 - DNA, 87 bp, homo sapiens
aagtacaagaacatagactgtactatgtgcctgtaagcatgtgtagcacaaatatattgtttaaagtacaaggacatagactgtact

SEQ ID NO: 4326 - DNA, 106 bp, homo sapiens
atttatttatttattgagacggagtctagttctgtagtaactggaactacaggtacacatcaccccactcaatttatttatttattgagacagagtctagttctgt

SEQ ID NO: 4327 - DNA, 158 bp, homo sapiens
agctagatagagagtgtggacacaaaggttctccaaggccccaccagagtagctagatacagagtgtcgattggtgcattcagaaatcctgagctagacacagggcgctgattggtgtgtttacaaaccttgagctagatacagagtgccgattggtg

SEQ ID NO: 4328 - DNA, 82 bp, homo sapiens
cttccaaccctgattcatatgaaaaatgactccatacttatagtatcccatttcttccccttccaaccctgattcatatgaa

SEQ ID NO: 4329 - DNA, 125 bp, homo sapiens
tcagccttcattgaagattaaaggctttctctaatcatcaaccaacctctgcttgtttcaaactttttcttctatagcttcctcacttctatcagccttcattgaagattaaaggctttctctaa

SEQ ID NO: 4330 - DNA, 104 bp, homo sapiens
aaagagatatggatcacttgagcccagatgttttcccttaatcattatatatgtctttagttttgttacataaagagatatggttcacttgagcccagatgttt

SEQ ID NO: 4331 - DNA, 105 bp, homo sapiens
agcaatcctcctgcctcggcctcccaaagtgctgggattacaggcatgttgcccaggctggtcttgaactcctgggcttgagcaatcctcctgcctcagcctccc

SEQ ID NO: 4332 - DNA, 95 bp, homo sapiens
ggcaagaacccatctttaaaaaaaaaaaaaaaaatacacacacacacacacacacacacacacacacacacggcaagaatccatctttaaaaaaa

SEQ ID NO: 4333 - DNA, 99 bp, homo sapiens
tatacaaagagaaaaaaattcaagatggagaattattttgttatcctggccaaaaagagaaaaacatgacctatacaaagagaaaaaaattcaagatgg

SEQ ID NO: 4334 - DNA, 83 bp, homo sapiens
tataatataatgaatatttttcatattcattatatttcatataatataatgaatatatttcatattcattatatttcatataa

SEQ ID NO: 4335 - DNA, 118 bp, homo sapiens
aaatattatatcaaaaagatacctgcatacatatatattgtatatatatacacatatacaatcccactcctgggtatatacccaaaggaaaatattatatcaaaaagatatctgcata

SEQ ID NO: 4336 - DNA, 107 bp, homo sapiens
atagaagttaccagtacaaagacaaacattagaacacaattaaaagccatcctaagtaccagggacttatagaagttatcagtacaaagacaaacattagaacacaa

SEQ ID NO: 4337 - DNA, 118 bp, homo sapiens
tttatcaagatgcggaatttaaaagcatcaaggaaggagggagagaagctattggtttggattgttactgataaatacatttattttatcaagatgcagaatttaaaagcatcaagga

SEQ ID NO: 4338 - DNA, 74 bp, homo sapiens
aacctgcattatatctatatttaaaataaatattgtattcttccactctcaacctgcattgtatctatatttaa

SEQ ID NO: 4339 - DNA, 78 bp, homo sapiens
gttttcatttcttccaaatagattatgttcttgattgtggcaatatcaagaaattgtttttatttcttccaaatagat

SEQ ID NO: 4340 - DNA, 108 bp, homo sapiens
caccaatcggcactctgtatctagctcaaggtttgtaaacacaccaatcagcaccctgtgtcttgctcagggtttgtgaatgcaccaatcgacactctgtatctagct

SEQ ID NO: 4341 - DNA, 134 bp, homo sapiens
gaacataaattgtgaagatttcatggacatttatcagttcccaaaattaatacttttataatttcttacacctgtctttactgcaatctctgaacataaattgtgaagatttcgtggacatttatcagttccca

SEQ ID NO: 4342 - DNA, 105 bp, homo sapiens
cttttatatgtttagagacacaaataccattgggttacaattgcccaacaaaattataatactgtatttgtactgtaccttttatatgttcagagacacaaatac

SEQ ID NO: 4343 - DNA, 92 bp, homo sapiens
tgggtctcctctctgctgagagctgagcagatgacaggagacctgcctgtggggaggatctacccactctgggtctcctctctgctgagaac

SEQ ID NO: 4344 - DNA, 110 bp, homo sapiens
ctttgtcaaactggtgctttcttttttttttttttttggtggggggaccgagtctctctctgtcaccaggcttctttgtcaaactggtgctttctttttttttttttttt

SEQ ID NO: 4345 - DNA, 105 bp, homo sapiens; identical to SEQ ID NO: 4342

SEQ ID NO: 4346 - DNA, 92 bp, homo sapiens; identical to SEQ ID NO: 4343

SEQ ID NO: 4347 - DNA, 110 bp, homo sapiens; identical to SEQ ID NO: 4344

SEQ ID NO: 4348 - DNA, 92 bp, homo sapiens
caaagaaggattttgtctttctaacttagtgaatcaagggacagaaatggagagagaggcaaagaaggattttgtctttctaaattagtgaa

SEQ ID NO: 4349 - DNA, 115 bp, homo sapiens
gttcagtggtgaattaaacagacaagcatccccctcctcaaaaacgcaacattctagcaagtgcaaaggcaggtgcaaagttcagtggtgaattaaacagacaagcatccccctc

SEQ ID NO: 4350 - DNA, 72 bp, homo sapiens
ttgggaggccgaggcaggaggattacctgagtccaggaaaatgagccacttgggaggctgaggcaggaggat

SEQ ID NO: 4351 - DNA, 158 bp, homo sapiens
caccaatcagcactctgtatctagctcaaggtttgtaaacacaccaatcagcaccctgtgtctagctcagggtttgtgagtgcaccaatcgacactctgtatctagctactctggtggggccttggagaacctttgtgtcgatactctgtatctaact

SEQ ID NO: 4352 - DNA, 195 bp, homo sapiens
agctagatacaaaggttctccttgtgcccatcagattagttagatacagagtgtcgacacaaaggttctccaaggccccaccagaatagctagatacagagtgtcgattggtgcactcacaaaccctgagctagacacagggtgctgattggtgtgtgtaccaaccttgagctagatacagagtgccgattggtg

SEQ ID NO: 4353 - DNA, 115 bp, homo sapiens
atatattatttacttatttacatcatatctttccctataatgttatcacaatagtaaaaatattacacaaatatgtatatatttatttacttatttacatcatatctttccctat

SEQ ID NO: 4354 - DNA, 94 bp, homo sapiens
aatgacatacagtttaataaagaaattaataccagccttctccctgactggatagatgttgcaatgacatacagtttaataaagaaattaatac

SEQ ID NO: 4355 - DNA, 113 bp, homo sapiens
tttttttaaatgccaagttaaattttgtcagcattctagatcatgagaaatacattttctgaaacacatttctaatttttttttaaatgccaggttaaattttgtcagcattc

SEQ ID NO: 4356 - DNA, 186 bp, homo sapiens
agctagatacagagtgtcgactggtgcattcacaaaccctgagctagacacagggtgctgattggtgtgtttacaaaccttgagctagatacagagtgccgattggtgtatttacaatccctgagctagacataaaggttctccaaggccctaccagagtagctagataaagagtgccgattggtg

SEQ ID NO: 4357 - DNA, 94 bp, homo sapiens
ggtagctcctttccataggcaggttgccctgataagtgtccaactctcagcagggaggagacccatagtaggtagctcctttccacaggcaggt

SEQ ID NO: 4358 - DNA, 81 bp, homo sapiens
tgtgcccagagcctatgcataaggcttatgtgttggacctgtgtgtccagggcctgtgtgcccagagcctatgtataaggc

SEQ ID NO: 4359 - DNA, 94 bp, homo sapiens
aagaagaaggggattttgctgtctcaagaagaaattgtgtcttaagaagaagttccatcctctaaagaagaagaaggagattttgctgtctcaa

SEQ ID NO: 4360 - DNA, 103 bp, homo sapiens
ccaatcagaggctgaaatgaagttacaaagttataagctatgcaaacatctgattgcttgtgggaggggaccaatcagaggctgaagtgaagttacaaagtta

SEQ ID NO: 4361 - DNA, 154 bp, homo sapiens
gagctgttaacactcactgtgaaggtctgtggcttcactcctgaagtcaacgagaccatgaacccaccaggagcaacaaaccaactccagatgcaccacctttaagagctgtaacactcactgtgaaggtctgtggcttcactcctgaagtcaa

SEQ ID NO: 4362 - DNA, 73 bp, homo sapiens
tcaaatgattcttagataactttaaaaaagtaggaagcataattagtagctcaaatgattcttatataacttt

SEQ ID NO: 4363 - DNA, 74 bp, homo sapiens
ccatgcctgattcacagaagatggagaagttaggcagacaatctctgcagccatgcctgattcacagaagatgg

SEQ ID NO: 4364 - DNA, 127 bp, homo sapiens
cctgaggaaagatgggccatctactgtcagaaacatggccgtaccttacagcttaccagttggctttaggtggccaagaagcagacatcctgaggaaagatgggccatctactgccagaaacatggc

SEQ ID NO: 4365 - DNA, 102 bp, homo sapiens
ataactccctacagtcctccacttagcagtcatccacactcacaattttagtctctttcctcctctatgcacccacacataactccctacagtcctccactt

SEQ ID NO: 4366 - DNA, 75 bp, homo sapiens
aatgtcatcagttaaggcaggaacaggccattttcacttctttcgtggtggaatgtcatcagtgaaggcaggaac

SEQ ID NO: 4367 - DNA, 101 bp, homo sapiens
cttttctctaaactcaaaaacaaaactttaagttgggtaccaaactagtttctaatactgatttcattttttttaaacttttctctaaactcaaaaacaaa

SEQ ID NO: 4368 - DNA, 111 bp, homo sapiens
aagataatgtggtgtatgtacatgatggaatattttcagccataaaaagaatattattattaatggatgaataaataaagataatgtggtgtatatacatgatggaatatt

SEQ ID NO: 4369 - DNA, 99 bp, homo sapiens
tgaatcttggagaacatcttagaatcctgtttatcacagtcattatgcccattttccaccataaatgaatattggagaacatcttagaatcctgtttat

SEQ ID NO: 4370 - DNA, 134 bp, homo sapiens
aaaatcttttattataatattaataatagcttgttccatcctagcatatgatatctctacatcaatttatcatctgatttggaaaaacaaaatcttttattataatattaatattagcttgttccatcctagca

SEQ ID NO: 4371 - DNA, 116 bp, homo sapiens
tcttcttgctcatcctccttgctgtctggcctcggagaaggaaaaggagaagggagggcatcattggagtgatgacatgtgtgtcttcttgctcatcctccttgctatctggcctc

SEQ ID NO: 4372 - DNA, 87 bp, homo sapiens
ttgaatcagggggatgggtctttcccatgtgtcatgaaagggactcagtggaagttaattgaatcagggagatgggtctttcccatg

SEQ ID NO: 4373 - DNA, 92 bp, homo sapiens
aatttcagtagttgacaatatgcctttaactcttccttcataacctttgtgctattactgttatttacaatttaagtagttgacaatatgcc

SEQ ID NO: 4374 - DNA, 81 bp, homo sapiens
ggagacaggtggtaacattctatgagaattactcttagaagcatgtagaacaaatggtggagataggtggtaacattctat

SEQ ID NO: 4375 - DNA, 103 bp, homo sapiens
caacaatgaaattgatctctgaagaaaaacagaggtttgcttcaaagagaacagtgcatttctgactggtagtagaaaccaacaaagaaattgatctctgaag

SEQ ID NO: 4376 - DNA, 74 bp, homo sapiens
cttgagcccaagtgtttgagaccagcctggacaacatagggagaccccaccttgagcccaagtgcttgagacca

SEQ ID NO: 4377 - DNA, 116 bp, homo sapiens
tatatgtctatatgtgagactaccatatatatgtgtgtatatatatgtctatatgtgagactatcatatatatgtatatatgtgtgtatatatgtctacatgtgagactaccatat

SEQ ID NO: 4378 - DNA, 101 bp, homo sapiens
taaccattgttctactctctacatccataaaatcatccctcctccttccttttcttctcagcctctaataaccattattctactctctacatccataaaat

SEQ ID NO: 4379 - DNA, 165 bp, homo sapiens
ctttctttactcttttttatcctttatttctttttcatctcataaatctcttatttatttatatctcataaatcccattgactttctttactcttttttatcctttactctttttatcttttatttctttactcttttttatcctttatttctttttattctttt

SEQ ID NO: 4380 - DNA, 125 bp, homo sapiens
tgataaatgtccatgaaatcttcacaatttatgttcagagattgcagtacagacagacataagaaattataaaagtattaattttgggaactgataaatgtccatgaaaacttcacaatttatgt

SEQ ID NO: 4381 - DNA, 116 bp, homo sapiens
gaccatcaccactgatctgtttagtgtagtttcaccatcataaaaaatcctctgtgctttttctattcaactctctccttttccccaggaccatcactactgatctgtttagtgta

SEQ ID NO: 4382 - DNA, 434 bp, homo sapiens
ccaatattaaaaacaatatcacagggtgggtgtacactccctgcgatattggggttaacatcatcctctctttccctgatattaaccacaatgtcaaagtaggggtgtacaccccctgcgctattgggagtaatgtcatcctttctccccctggatattaggaaatgtctcaagtggggtttataccccctgcaatattgggaataatatcatctaaatattagaaacaatatcatggggtggggtgtacacctcctgcaatattgcgagtaatatcatcctctttcccccctgcatataaggaacaatatcacggggtggggggtacaccccctgcgattttgacagtattatcatcgcctccccccttggatattaaaaacaatatcacaagggaaatataacctccctgtgatattgggagtaatatcatc

SEQ ID NO: 4383 - DNA, 220 bp, homo sapiens
taaatattagaaacaatatcatggggtggggtgtacacctcctgcaatattgcgagtaatatcatcctctttcccccctgcatataaggaacaatatcacggggtggggggtacaccccctgcgattttgacagtattatcatcgcctccccccttggatattaaaaacaatatcacaagggaaatataacctccctgtgatattgggagtaatatcatc

SEQ ID NO: 4384 - DNA, 216 bp, homo sapiens
tggatattaaaagcaatatcatagtgagggtgtacaccctctgcgatattgggaataatgtcattctctccacctgtggatatgacaaacaatatcacagtgggagtgtacaccctttgggatattgggaataataacatcctctcctacccaggatattaggaataacatcgaagggggatgtacatgccctgcgatattgggagtaatatcatc

SEQ ID NO: 4385 - DNA, 360 bp, homo sapiens
tggatattaggaactgtatcacaggggaggtatacaccccctgcgatattgggagtaatattttcctctcctccctggatattaggaacaatatcacgggggtgtacacccccttcaatattgaaagtaatatcctcttttcccctggagatcaggaacaatatcaatggagggtgtacacccccttcaatattggggtaatatcatcctctccttcccttgatattaaaaacagtaccacagggatgtgtacaacccctgcgattttgaaagtaatatcatcctgtcctcttctggatattaggaagactatcacaggggtgtgtgtacaccctctgcgatattgggagcaatatcatc

SEQ ID NO: 4386 - DNA, 248 bp, homo sapiens
tacatattagaaacaatatcacaggggtgttgtacaccttctgcgacattgggagtaatagcatcatctttcccagtggatattaagaacaatatcacaggcaaggtgtacattccttgagatattgggagtaatatcctctcctaacctgagtattaggaacaatatcacagtgggggtgtacaacttctacgatattgggagtagtgttatcctctccacccttgtatattaggaagaatatcaca

SEQ ID NO: 4387 - DNA, 214 bp, homo sapiens
tgcaaattattaacaatatcacaagtggggtgtacaccttctgtgatatgggaagtaatatcatcctctctttcctggatattacgaacaatatcacaggggggtgaacactccctgcggtattgggaataatatcatcctctttcccactggatgctaagaacagtatcacagggaggtgtacaacccctgagatattaagagtaatatcatc

SEQ ID NO: 4388 - DNA, 688 bp, homo sapiens
tggatattaggaacaatatcacaaggagggttcacaccccctgcgatattgggagtgatatcatcctcttccctactggatagtaggaacaatatcacgggggagtgtaccgtcttttcgatattggaagtcatatcattctctttccctctggacattaggaacaatatcacagggaaggtatactccacctgtgatattgacagtaatattattgtcttccccattggatattaggaacagtaccacaaggggtgtgtacacctcctgcgatattgggaataatacaattttcttctcctttgatattagaagcaatatcacagggggtgtgtacacgctttgccatattgggagtaatatcatcctatccccactaaatattaggaacaatatcacaaagggggtatacactccctgcgatattgggagtaatataatcctcttccccctggatattaggaaaaataccacagggtgtgtgtactcccccagtaatatcaacctctcccccactggataataggaacaatattacagagggggggtacaccccctgagatattgaaagtaatattatcctctcttcccttggatattaggaacaatatcacagaaggggtttacacctcctttgatattgggattaatattctctcttccactggatattaggaaaaatatcaca

SEQ ID NO: 4389 - DNA, 367 bp, homo sapiens
tggatattagaaacaatatcgcagggggatgtacacaccctgtgatattggaaataatatcttcctattcttttctggatattaggaaaaatatcaccggggggtatacaccccctgccctatttggagtaatattgtcatcacccactttggatattaggaagactattacaaggagggtatacatcccctgcgatattgaaaataatatcatcctctctccctctggatattagaaacaatatcacaggggtggtgtacaacccctgcgacattggaagtaacatcatccactttccccatggatattaggaactatattacagggtgggtgtacaccttctctgatattgggagtaatatcatc

SEQ ID NO: 4390 - DNA, 365 bp, homo sapiens
tggatattaaaaacaatgtcacagcagggtgtacaccccctgcgatattgacagtaatatcttctacccccttggatattaggaacaatatcaaaccgggggtgtacaccccctgcgatattgggggtactatcatcctcttcccacctggatattatgatcaatatcacagggaggacgtacaccccctgtgatatttggagtaatattattctctctccagctgtatgttagaaacaatatcacagaggaggtttacacccccttcgatattgggtgtaatatcatcctctccccaccctggatattagaaacaatatcacagggggttgtacaccgactgtgatattgggagtaatatcatc

SEQ ID NO: 4391 - DNA, 441 bp, homo sapiens
tggatattaagaacaacatcacaggggggtgtacactccctgtggtattgggattaatatcatcctcttcctccgtggatattagaaacaatatcacaaagggttattcccccaacctgcgatattggtagtaatatcttctcccctcatgaatattaggaataatatcacagggggtgtgtacatcccttatgatattcggagtaatattattatctccccctgcatatattaggaacaatatcacaaagggggtgtaaaccccttgcaatattgaggataatgtcatactccctctcttggatattaggagcagtatcacacggggggtgtacaccccctgcgatattgggagtaatatcatcctctccccccctacatataaggaacaatatcacagggaggatgtacacccccttcgatattgggattaatatcatc

SEQ ID NO: 4392 - DNA, 524 bp, homo sapiens
tgaatattgttaacaatatcacaagggggatgtacacctcttgctttacagggagtaatatcctcctctccacccacgatattaggagcaatatcatgggggggggtgttgtacatttcctgcggtattaggagtaatattctctcctcccctggatatgaagaacaatatcacaggggggtgtacaccccctgccatatttggagtaatatcatcttctctgttcctggatattaggaacaatatcacagcatggggagtataccccatgcgatattgggagtaatattgtcgtctcctctccattacattaggagcaatatcacaaggagggaatacaccccctgcaataatgggagtaataatatcctccaccccccctggatattaggaacaatatcacaggggggatgtacatcccctgcgatattgggagtaatatcatcttctgcccctctcgatattagaaacaaaatcatggggagggggtgtacaccacctatgatattgggaataatattatc

SEQ ID NO: 4393 - DNA, 242 bp, homo sapiens
tggatattaggaacaatatcacatgggggttgtatactccctgcgatattgtgagtaatatcatcctgtcccctcttgatattaaaaacaatatcacaggggggttgtacacatcctgtgatattgggagtaatatcttctccctccctggatattaggaagaatattacctccccttttggatattatgaatactatcagagagagtgtacagcacctgcaatgtgaggagtaatatcaca

SEQ ID NO: 4394 - DNA, 414 bp, homo sapiens
tggatattatgaataatatcacagagggtgaacagcttctgctatgtgaggagtaatatcacctcctttggatattacgaataatatcacataggttgtacaccccctgcgatgtaaggagtaatgtcaccttccccttttgatattataaatactatcacagagggtgtacaccccctgtgatgtaaggagtgatatcacctctcccttggacattactcctaatgtcacagaaggtgtacagagcctgcattgtgagcagtaatatgacttccgccctttgatattacaaatattattgcagagggtgtacaatccctgcatagtgaggagtaatatcacctccccttttggatattactaatattataacagagtgtgtacagcccctgcgatgtgagcagcaatatcacc

SEQ ID NO: 4395 - DNA, 207 bp, homo sapiens
cggatattaagtatatgatcacagaggctgtacagcccctgtgatgtgaggagtaatattacctttccccttggatattacgaatataatcacagagggtgtacacacagactgtttaaatattgcaagtaatatctctccccttggatattacgaatataatcacagagggtgtacagcccctgtgatatgaggagtaatatcacc

SEQ ID NO: 4396 - DNA, 411 bp, homo sapiens
tggatattatgaataatatcacagaaggtgtacacccactgctatattacaggtaatatctcctccctttaatattatgaataatatcacaaagggtgtacacccactgttacattaggagtaatatctcctcccttggatattacaaataatatcagagagctgtacatctactgagattttagaggtaatatcatctcctccctccgatattacaaataatattacagaggatgttcacccattgtgatattggtagtaatatcatcttttttcttttatattatgaataatatcacagagggtgtacacccactgcattattaaaggtaatattatctcctcctttggatattatgaataatatcacagagggtgtacccccactgcgatattaagagtaatatctct

SEQ ID NO: 4397 - DNA, 801 bp, homo sapiens
taggtattatgaataatatcactgggtgtacacccaggttgtacaaccagtgtgatattaggagtaatgtctcccttagatattacaaataatatcaccaggtgttgacccactgtgatattaggagtaatatcttttattatgaataacatcacagggtgtatgcccacggtgatattaggagtaacatcttccagatattatgaataatatcacagggtgtacacacagcgtcttcacccactgtgatattataagtaatatcttttacgtattataaataatatcacagggtggacacccatggtgatattagtagtaatttcttttagatattatgaataatatcacagggtgtacacacaacgcctacacctatggtgatattacaatatcttttatgtattgtgaataacatcacagagtagacacccacgatgattttaggagtaatatcttttagatattataaataacaccactaagtgaacacccatggtcacattagtagtaatatctttcagatagtatgaataatatcacagtgtgtacaccagcgcttatattaggagtaatatcttttaggtattatgaataatatcacaggttgcacaccaagggtaatattagcaggaatatcttttagatataatgaataatatcacatggtgtacccacatggtgcacatccacggtgatattatgagtaacatctcttagatattgtgaattagattacagggtgtacaccctcggtgatattaggagtaatatattttagatattatgaataatatcaca

SEQ ID NO: 4398 - DNA, 199 bp, homo sapiens
gagatattatgaataatatcatcatagggtatacacccacaatgatattaggagtattatcttttacatattatgaataatatcacagggtgtacacacaggatgtactttcatggtgatattaggagtaatatattttagatattatgaataatatcacagggtgtacacccacggtgatattaggagtaatatcttt

SEQ ID NO: 4399 - DNA, 183 bp, homo sapiens
tagatattgtgactaataccacagggtgtatatccatggttttgttaggaggaataccttttagatattgtcaatagtatcacagggtgtacactcacggtgatattaggagtaatgtcttttagatattgtaaataatatcacagggtgtacacccacggtgatattaggagtaatatcttt

SEQ ID NO: 4400 - DNA, 322 bp, homo sapiens
tggatattatgaataatatcaccgtgtgttaacaacagtggatatcagtagtaatattgtggatattaggaataatatcacagtgtgttaacacagtgtgtcaacactggatattagtgatatcatgaaaaatatcacagtgtgttaacactggacattagtagtaatatcatgaatattctgagtaatataacagtgtgttaacactggatattagtattaatatctaatgtgtgttagtaataatatcacagatactatgaatagtatcacagtgtgttaacatagtgtgttaacactggatatcagcattaatatcatg

SEQ ID NO: 4401 - DNA, 120 bp, homo sapiens
ggaagcaaaaactgagatgcagacaaattattatccaggataatttgaaacaagggtttgtaattgaactaatggggaagcaacaactgagatgcagacaaattattatccaggataatt

SEQ ID NO: 4402 - DNA, 125 bp, homo sapiens
ataagtgtccatgaaatcttcacaatttatgttcagagattgcagtaaagacaggtgtaagaaactatacaagtattaatttggggaactaataaatgtccatgaaatcttcacaatttatgttc

SEQ ID NO: 4403 - DNA, 96 bp, homo sapiens
agagctgccttcttgagagatcagaggaagagtagaacagaggcacagcggagagacaatgaggagagctgccttcttgagagatcagaggaagag

SEQ ID NO: 4404 - DNA, 81 bp, homo sapiens
ccagggagaaagacctaaaaattataagtgtaggtgattattttgtgattattccagggagaaagacttaaaaattataag

SEQ ID NO: 4405 - DNA, 107 bp, homo sapiens
gcactccagcctgggtgacagagtgaggctccgtcttaaaaaaaaaaaaaaaaaaaaattagctgattgcgccaccgccgcacttccagcctgggtgacagagtgag

SEQ ID NO: 4406 - DNA, 93 bp, homo sapiens
tttacaaccctttagctagacacagagctctgattggtgcgtttttacagagtgctgattggtgcatttacaaacctttagctagacacagag

SEQ ID NO: 4407 - DNA, 557 bp, homo sapiens
aagaaacatgaaaaagcaaggaaatcttctatccttatacaagaaacatgaaaaaacatgaaaaagcaaggaaacaagacacctccaaaggaacacaataattaaccagtaacagataccaaaaaaatggacatttatgaaatgcctgaaaaataatttaaaataatgatactaaagaaactcagggaaaaacaagagaacatagataaataatacaaagaaatcaggagaaaacaattcctgatctgaacaaaacattcaacaaagagatagatatgctcaaaaagaactaatgagaaatactggaactgaagaactcaatgaataaaatttaaaaatacaattgagaacttcaacaatatactagatcaagcagaagaaggaatatctaaacttgaagacaggtcctcgaaataacaaagtcagatcccaccccaaaaaaaagaaaagaataaagaataaaaaagaatgaagaaagccacatataaacagcataaagtgaccaaatattcaaattgagggagttccaaaagaagagatgggcaaaggcatagaaa

SEQ ID NO: 4408 - DNA, 117 bp, homo sapiens
tctaaaaatgacatgtgtggtctcagctaaacctagaaatttggtcttgattacaatactaaaatgcagtaaatttactctaaaaatgacatgtgtggtctcagctaaacttagaaa

SEQ ID NO: 4409 - DNA, 98 bp, homo sapiens
aatatttttgaaaaacgcagaatagtaattggtgtatagtttatctggaagaagaaatgcacaagaacagtcaagaatatttttgaaaaatgcagaat

SEQ ID NO: 4410 - DNA, 89 bp, homo sapiens
aaattcaagcacttatttctatcctgtactcccaatgtaggctcaaaagtcagtctgctcccgaaaaatccaagcacttatttctatcc

SEQ ID NO: 4411 - DNA, 84 bp, homo sapiens
ctgaaatgtatatgcttaaccttgtctacacccataccaccctaaacacacccgatctcgtttgaaatgtatatgcttaacctt

SEQ ID NO: 4412 - DNA, 81 bp, homo sapiens
aataatctggctctgtgtgtgtgtgtgtgtgtatacatatatatatatatatatataaataatctggctctgtgtgtgtat

SEQ ID NO: 4413 - DNA, 78 bp, homo sapiens
cccacaatagagcagtgattcttaatctttacctctataatctcattttttcccccacaatagagcagggattcttaa

SEQ ID NO: 4414 - DNA, 112 bp, homo sapiens
ataagcaaactgaaacccaactcattgtaaatagtgaaatgaaacttttagcttaaccaatcagaaacttccaactatataagcaaactgaaacccaactcatcgtaaatag

SEQ ID NO: 4415 - DNA, 108 bp, homo sapiens
tgccattaagaacatttgtgattcctctgctggatctcaggaaagtcaattgaaaacctcccataaaggattcaccattctaggtgccattaagaacatttgtgattc

SEQ ID NO: 4416 - DNA, 108 bp, homo sapiens
gtgcatttttttcttctatttcttctattcttctatttcttctatcttctatttcttctattcttctatttcctctatcttccatttcttctaattcttctattcttc

SEQ ID NO: 4417 - DNA, 79 bp, homo sapiens
aaaaggcagagaattaccaatactgactcaaacagtatagcaaagaagggggaaaaaggcagagaataaccaatactga

SEQ ID NO: 4418 - DNA, 118 bp, homo sapiens
gttaacacacaaggaaagtcttcactcactcctagaggtaggatcagatttgaccaaataaaatgggaaaacccaagtaatgtgttaacacacaaggaaagtcttcactcactcctag

SEQ ID NO: 4419 - DNA, 111 bp, homo sapiens
cctgcatggagataaaattgaatattattttttcctattatttttgatagccatttcctactattctaaaataagaatccctgcatggagataaaattgaatatttttttc

SEQ ID NO: 4420 - DNA, 104 bp, homo sapiens
tttttataactaatggtgctggaatatatatatatatatatatatatatatatatatatatatatatatatatataatagttgttataactaatggtgctggaa

SEQ ID NO: 4421 - DNA, 75 bp, homo sapiens
tctgtatctagctactctggtggggccttggagaacctttgtgtccacattctgtatctagctaatctggtgggg

SEQ ID NO: 4422 - DNA, 102 bp, homo sapiens
actcggagaacttttatgtctagcaggaggattgtatatgctccaatcagcactctgtatctagctaatctgatgggcacttggagaacttttatgtctagc

SEQ ID NO: 4423 - DNA, 85 bp, homo sapiens
tatagcacagcatattatatatatagtatacataaaatatacaataaaatataagtgatatttatagcacagcatattttatata

SEQ ID NO: 4424 - DNA, 92 bp, homo sapiens
tgtgatctttgttggacccttatcagcggttctgcttttgccctttgtcctattccctcagaagcatgtgatctttgttagacccttatcag

SEQ ID NO: 4425 - DNA, 104 bp, homo sapiens
tgcgatgggggtcctaagagccagggggtgataggggctggctcttactccccgtaccccggggtggggcctcaacccctgcgatggggctcctaagagccagg

SEQ ID NO: 4426 - DNA, 82 bp, homo sapiens
gagtataggtctgcaccactatgcctggttaatcccagcctcttgagtagctgggagtataggtctgcaccaccatgcctgg

SEQ ID NO: 4427 - DNA, 147 bp, homo sapiens
agggggtcagggaggaggtgggcagctccctcagtctctcttcacacctcttcctatagaatcttccattcccagctggaaaatacagcacagtctggaaagggggtcagggaggaggtgggccgctccctcagtctctcttcacac

SEQ ID NO: 4428 - DNA, 84 bp, homo sapiens
aaaccccatctctactaaaaatacaaaagtttgagatcagactggccaacatagtgaaactccatctctactaaaaatacaaaa

SEQ ID NO: 4429 - DNA, 140 bp, homo sapiens
ttaatattaggaacagtatcacgggggggtgtacaccccctgcgatattggaagtaatatcatcctctcctaccctggacattagttataatatcacagtgcaggtgtacaccccctgtgatattgggagtaatatcatc

SEQ ID NO: 4430 - DNA, 141 bp, homo sapiens
tggatattaggaacaaaatcacatgggggttgtacaccctctccgatattgggagtaacatcatcctctcctaccataattattagggacaatatcacaggggtggtgtacaccttctgcgatattgggagtaatatcatc

SEQ ID NO: 4431 - DNA, 67 bp, homo sapiens
cagatattaggaacaatatcacggtgggggggtgtacacgctctgtgatattgggagtaatatcatc

SEQ ID NO: 4432 - DNA, 136 bp, homo sapiens
tggaaattaggaacaatgttacagagggggtgtacaccaactgcgatattggtggtaatatcctctacttcctggatattaggaacaatctcactgggggttgtacaccccctgcgatattgggagtaatatcatc

SEQ ID NO: 4433 - DNA, 65 bp, homo sapiens
tggatattatgaacaaaatcacagagtgtgtgtacactttctttgatattgggattaatatcatt

SEQ ID NO: 4434 - DNA, 87 bp, homo sapiens
tggatattagtaacaatatgacagtggggtgcaatattgagagtaatatcatcctctctcccactggctattaggaacaatatcgca

SEQ ID NO: 4435 - DNA, 64 bp, homo sapiens
tggatattaggaacaatatcacagggcggtgtacaacccctgtgatattggaagcaatatcatc

SEQ ID NO: 4436 - DNA, 66 bp, homo sapiens
tagatactaggaaaaatatcacagcgggggtgtacatccccctgtgatatttggagtaatatcatc

SEQ ID NO: 4437 - DNA, 137 bp, homo sapiens
tggatattacgaataatatcacagagggtgtacacacaggatgtttacaatattaggagtaatatctctccccttaaatattactaatagtatcacagagggtttacacttccagtgatattaggagtaatatcatc

SEQ ID NO: 4438 - DNA, 61 bp, homo sapiens
aggatattacaaataatatcacaaggtgtacacccaccgtgatattagaagtaatatctct

SEQ ID NO: 4439 - DNA, 124 bp, homo sapiens
tagattttatgaataatatcacagggtgtacacccactgtgatatgaggtgtaatatctcccttacatattacgaataatatcacagggtgtacatccactgtgatattaggagaaatatctcc

SEQ ID NO: 4440 - DNA, 124 bp, homo sapiens; identical to SEQ ID NO: 4439

SEQ ID NO: 4441 - DNA, 124 bp, homo sapiens; identical to SEQ ID NO: 4439

SEQ ID NO: 4442 - DNA, 61 bp, homo sapiens
tagatatcttcaatagtatcacagggtgtacatccacgttgatattagaagtaatatcttt

SEQ ID NO: 4443 - DNA, 122 bp, homo sapiens
tagatattataaataacaccatagggtgtacatccatggtgatattaggagtaatatcttttagatattatgaataatatcacagggtgtacgcccacggtgatattaggagtaatatcttt

SEQ ID NO: 4444 - DNA, 61 bp, homo sapiens
tggatattgtcaacagtatcacagggtgtacacccatggtgatattaggagtaatatcttt

SEQ ID NO: 4445 - DNA, 94 bp, homo sapiens
tggatgtcagtagtaatatcatggatattatgaataatatcacagggtgctaacacagtgtgttcacaccctggatatcagtagtaacatcata

SEQ ID NO: 4446 - DNA, 111 bp, homo sapiens
ttttcctctactctttcttttcacatgtatatctcatgtaaaatgtagattttctgagtacaacatgaatgcataattgattttttcctctactctgtcttttcacatgta

SEQ ID NO: 4447 - DNA, 137 bp, homo sapiens
aggcatttgtattttgttccatagtactgtatggtgttaggtctctagattacaggcgtgagccaccacgtctggcctttatttggtatttcttaaagaggcatttgtattttgttccatagtactgtatagtgtta

SEQ ID NO: 4448 - DNA, 183 bp, homo sapiens
gatatatttgatatatatgatagcaaatgtatacatataatatatatttgatagcaaatatatacatataatatatatttgatagcaaatatatgcatataatatatatttgatagcaaatatatacatataatatatatttgatagcaaatatatacatatatatttgatagcaaatatatg

SEQ ID NO: 4449 - DNA, 111 bp, homo sapiens; identical to SEQ ID NO: 4446

SEQ ID NO: 4450 - DNA, 137 bp, homo sapiens; identical to SEQ ID NO: 4447

SEQ ID NO: 4451 - DNA, 101 bp, homo sapiens
cagtcccatcataagtcagggagctaggatggtttgacttaaggattttcttgattttataatgaattaatcaggacacagttccatcataagtcagggag

SEQ ID NO: 4452 - DNA, 86 bp, homo sapiens
cctcccaaagtcttgggattacaggggtgtaatcctgtaattacgcctcagcctcggcctcccaaagtcttgggattacaggggtg

SEQ ID NO: 4453 - DNA, 106 bp, homo sapiens
tgtttcttaataaagttcttttgaaaaatgggaacctttctcagatgggaattttgtatctttcctctgtttcttaataaagttcttttgaaaaattggaaccttt

SEQ ID NO: 4454 - DNA, 79 bp, homo sapiens
cagtggagtcctgaatgggggcggagttccgaatggggggcggagttccgaatgggggcggagttctgaatgctggtgg

SEQ ID NO: 4455 - DNA, 94 bp, homo sapiens
tgggtctgggcctggaaggatgcgtaggagtttgtcgagtggcaaggttgagggaacagacagggagacattgggtctgggccttgaaggatgc

SEQ ID NO: 4456 - DNA, 101 bp, homo sapiens
ctctgtggcccaggctggagtgcggtggcacgatctcggcttactgcaacctccacctcccggagtctccctctgtggcccaggctggagtgcagtggcac

SEQ ID NO: 4457 - DNA, 75 bp, homo sapiens
gttcctgcctttactgatgacattccaccacaaaagaagtgaaaatggcctgttcctgccttaactgatgacatt

SEQ ID NO: 4458 - DNA, 109 bp, homo sapiens
acagagcgagactccatctcaaaaataaataaataaagggaatttgacataaaatcgttaatgttgactgtttcagcctgggtgacagagcgagactctatctcaaaaa

SEQ ID NO: 4459 - DNA, 111 bp, homo sapiens
agttgtcctgccccagagccacccacacacaaagcatccagcatgcggagtggcataggcgtatctggaggagggcgcaggtgtagttgtcctgccccagagccacccaca

SEQ ID NO: 4460 - DNA, 106 bp, homo sapiens
acctttaggcggggtagagacatttaaaatggcccctaaacttggagggcgcgtaaagctcataggctggagcttcttaacctttaggcagggtagagacatttaa

SEQ ID NO: 4461 - DNA, 143 bp, homo sapiens
aaaataaatgattgcaaaaatgcacatataatagatattagatagcaacaaaaagcagataatatatagtagatagcaaatatatacatataatatatagaagatagcaaatatatacatatatatttgatagcaaatatata

SEQ ID NO: 4462 - DNA, 100 bp, homo sapiens
ccactgcactccagcctgggcgacagagggtgactcctcaaaaaaaagaaaaatagctaaaatatgattgtaccactgcactccagcctgggtgacagag

SEQ ID NO: 4463 - DNA, 74 bp, homo sapiens; identical to SEQ ID NO: 4233

SEQ ID NO: 4464 - DNA, 74 bp, homo sapiens; identical to SEQ ID NO: 4233

SEQ ID NO: 4465 - DNA, 74 bp, homo sapiens; identical to SEQ ID NO: 4233

SEQ ID NO: 4466 - DNA, 94 bp, homo sapiens
tatataatgattaagggaaaacatctgggctcaagtgatccatatctctttatgtaataaaactaaagacatatataatgattaagggaaaata

SEQ ID NO: 4467 - DNA, 107 bp, homo sapiens
tgctacagaagccaggcctttgggttggattatatttggacaatttttctacatttctagtatttttctattgtgctacagaagccaggcctttgggtgggattata

SEQ ID NO: 4468 - DNA, 121 bp, homo sapiens
acatccaaacaaaattagaccactcccattctcagattgagatgaggaggtaatgcattctctacattttcctgtctaaagaagcttgaacatccaaacaaatttagaccactcccattct

SEQ ID NO: 4469 - DNA, 91 bp, homo sapiens
ccctaatgccaactagtattttctattgaagtctaggtgtttaattatatataatattccctaatgccaactagtattatctattgaagtc

SEQ ID NO: 4470 - DNA, 102 bp, homo sapiens
gaacaataggtaaactggaaatctttacagacttacagtaagggcaagatttacagtaagtacctgttcttacacaaagaataataggtaaactggaaatct

SEQ ID NO: 4471 - DNA, 91 bp, homo sapiens
tgttgaatataatgtcctataaactttagttaggtcaggttatgtgttgttatgtgttggttatgtgttgaatataatgtcctataagctt

SEQ ID NO: 4472 - DNA, 117 bp, homo sapiens
tgggagcccactcttgcatcagtgggctggatgtgaggcatggagccacagaggtcgagctgcatgaggctgtgggagcccactcttgcatcagtgggctggatgtgaggcatggag

SEQ ID NO: 4473 - DNA, 95 bp, homo sapiens
aggtaacatgagcttccatctttgttcttgggctacttgggccctggagtatagtttgaagtcaggtaacatgatgcttccatctttgttcttgg

SEQ ID NO: 4474 - DNA, 72 bp, homo sapiens
ttttgaattatatagtaattaattttgttttaattttttgatttttagtttttgaattatatagtaatttat

SEQ ID NO: 4475 - DNA, 82 bp, homo sapiens
tctctactaaaaatacaaaaaattagctgggcatggtggcacatgcctgtgaaaccccgtctccactaaaaatacaaaaaat

SEQ ID NO: 4476 - DNA, 134 bp, homo sapiens
tactccagaatcaatttttcttttccttccttccttcctttcttccttccttccttccttcctccctcccttcctttcgacagcatctcactttgtactccagaatcaatctttcttttccttccttccttcct

SEQ ID NO: 4477 - DNA, 109 bp, homo sapiens
gtctagttattacctacaacatgaaaccatgaagattcaggaagcaatcaggattttttttattagtataatagcagtctagttattatctacaacatgaaaccatgaa

SEQ ID NO: 4478 - DNA, 96 bp, homo sapiens
gtctctgtcgcccaggctggagtgcagtggcgctttgttttggttttgttttttgatacagagtctgtctgtgtcgcccaggctggagtgcagtgg

SEQ ID NO: 4479 - DNA, 76 bp, homo sapiens
attttgtatttttagtagagacagcatttcactgtgccaccatatctggataattttgtatttttagtagagatag

SEQ ID NO: 4480 - DNA, 159 bp, homo sapiens
attctttaattctcaatttttgacctaagcccatgaacccaatccctttagtgattaaccacacagttaaaaattaaaggtaatgatgatcataaatgaccattaattctttaattctcaatttttgacctaagtccatgaacccaatccctttagtga

SEQ ID NO: 4481 - DNA, 95 bp, homo sapiens
gggggtttccacactatagtcccttctgcggtgaacagaaagatgttacaggactccaacacctactgggggtttcctcactatagtcccttctg

SEQ ID NO: 4482 - DNA, 108 bp, homo sapiens
atctcattgtggttttgatttgcatttcttcaatgatcagtgattctccaatgatcatttctccaatgatctcattgtggttttgatttgcatttctccaatgatcag

SEQ ID NO: 4483 - DNA, 75 bp, homo sapiens
cccaccagattagctagatacagagggtccacacaaaggatctccacgtccccaccagaatagctagatacagag

SEQ ID NO: 4484 - DNA, 85 bp, homo sapiens
ggaggcggacgttgcagtgagccaagattgtaccactgaggcaggagaatcacttgaacccaggaggcggacattgcagtgagcc

SEQ ID NO: 4485 - DNA, 126 bp, homo sapiens
agtccagggaaatgcccctgtccttcttatttttaatctctacttatttttagtctttattttaattatcctgacatctatagtccagggaaatgcccttgtccttcttatttttaatctctactt

SEQ ID NO: 4486 - DNA, 76 bp, homo sapiens
tatatttttcctcttgcggggcaggaagggggcaggttgcagggcagcggttatatttttcctcttgggggcaggt

SEQ ID NO: 4487 - DNA, 89 bp, homo sapiens
ccacttggctccctggcttcagcccccttcgtaggggaatggatggatctcctgcctcattgaattcccttggctccctggcttcagcc

SEQ ID NO: 4488 - DNA, 117 bp, homo sapiens
tgtttctgctgctgtgtcagtgagcgcaactattccaatcaggagggtgcagggactgttgcaggtttttgggcaagagatgtttctgctgctgtgtcagtgagcacaactattcca

SEQ ID NO: 4489 - DNA, 135 bp, homo sapiens
aacagaatgtacgttcttctcatctgcagatgacacatactctaaaataggcctaacagaaatctgcacatctctccacaccaaaacaacagaatgtacattcttctcatctgcagatgacacatactctaaaat

SEQ ID NO: 4490 - DNA, 72 bp, homo sapiens
agtaaacagacaacctacagaattgcacagaaaaagaaactatcaacaaagtaaacagataacctacagaat

SEQ ID NO: 4491 - DNA, 158 bp, homo sapiens
tatgtaaatgaagtggataaagtcaagttacaaagtcatttactccttatcagctctatgtgaatggagaggatgaagtgaagttacaaagtgtagagaagatgttactcagtgagtgtggcttatgtgaatggagaggatgaagtgaagttacaaag

SEQ ID NO: 4492 - DNA, 103 bp, homo sapiens
caatgacttaaaattataagtaatcctgaggccacagtcaagctttatgcagttatgctaagacatcgaatgttaccaatgacttaaaattatatgtaatcct

SEQ ID NO: 4493 - DNA, 163 bp, homo sapiens
attacatacattatgcaaatatgtaatttgtaattacacgaattacaaaattgttgatgttttatgatagaaaagactacgattatatagttaatctatgtaaagctatgcattacatacattatgcaaatatgtaatttgtaattacaagaattacaaaatt

SEQ ID NO: 4494 - DNA, 96 bp, homo sapiens
tggatctgtatgaatgatcaaattttatatatatatatgtatagaataatatatgatatataatatataatatggatctgtatgaatgataaaatt

SEQ ID NO: 4495 - DNA, 170 bp, homo sapiens
taattttatagattatgtaagattatgtaaattaagtaattaagtaatattacatgtaaatacttatgtaattatatagattatgtaaaattatgtgtaattttatgtaattatatagattatgtaaaattatgtgtaattttacataattatatagattatgtaaaatt

SEQ ID NO: 4496 - DNA, 206 bp, homo sapiens
gattggggggttcttgcccccagaaaagcagagaaggggtagagacacggagagaaggagttggggggtgcttgccccctagaaaagcagtacttgccgctaagggtgaaggagaaggggttggggggttcttgccccctagaaaagtggagaaggggtacagacacggagagaagaggttgggggattcttgccccacagaaaag

SEQ ID NO: 4497 - DNA, 96 bp, homo sapiens; identical to SEQ ID NO: 4494

SEQ ID NO: 4498 - DNA, 104 bp, homo sapiens
atgtaccactatatcacgttataatagctaacacgtgcacagacacacacacacattcatggacacacataaaacataatgtaccactatatcatgttataata

SEQ ID NO: 4499 - DNA, 144 bp, homo sapiens
ttacccacataacttaatcaatttcacctattaaatggcttcacctttcattctcattgcatatatggtttttatcaatgaagcattattatttcaattacccacataacttaatcaatttcacctattaaatggcttctacct

SEQ ID NO: 4500 - DNA, 109 bp, homo sapiens
caaatggcttgtacaagaatgttcataacagcttaattcatgataacccaaatatgataacagtttaattcatgataacaaatgacttgtacaagaatgttcataacag

SEQ ID NO: 4501 - DNA, 114 bp, homo sapiens
gactccatgtcccatgtccagggcacactggtgtacagggaagaataacaaggccttgggatagattccatgcaaggagtagactccatgtcccatgtccagtgcacactggtg

SEQ ID NO: 4502 - DNA, 79 bp, homo sapiens
caagtctctaggaagttccaaacttccccatatcttcctgtcttctgagccctccaagtctctaggaagttccaaactt

SEQ ID NO: 4503 - DNA, 102 bp, homo sapiens
atgagatgacatataaattgaaataaagttagtactagtgattattttttaaaacaacagtagaaatgggttcaatgagatgacatatcaattgaaataaag

SEQ ID NO: 4504 - DNA, 101 bp, homo sapiens
catcctcaaggaaggcttagtctgtaccctaactccactgcaccaatcccctttaagtccctccatcctcaaggaaggcttagcctgtaccctaactccac

SEQ ID NO: 4505 - DNA, 97 bp, homo sapiens
tatctatatattttatctaaattatatctcatgagcataatttaaatactagacccaaatgaacatatactgatttttatataatctaagaaacatt

SEQ ID NO: 4506 - DNA, 98 bp, homo sapiens
aatgacattatactttacataagttaactatttttatttttgacatatttttattagtgataatagcagaaaatgacattatactttatataagttaa

SEQ ID NO: 4507 - DNA, 76 bp, homo sapiens
atatgtttgttggctgcataaatgtcttcttttgagagacaacaaacataaatgtgtttgttggctgcataaatgt

SEQ ID NO: 4508 - DNA, 97 bp, homo sapiens
cagagagctgcaccaagcagagctgactttcctctagaaatcagtcagcagcaacaaactcttacagagagctgcaccaagcagagctgactttcct

SEQ ID NO: 4509 - DNA, 89 bp, homo sapiens
ataagacactttgagataccatactcaaatactttaaaaattatgtgagtaaatgaagtacaataagatactttgagataccatactca

SEQ ID NO: 4510 - DNA, 102 bp, homo sapiens
atttaacttcctcctttactactgtaacatctttttttaaaaaaaaaaaaaaaaaaaagaaaaggacatttaacttcctcctttactagtgtaacatctttt

SEQ ID NO: 4511 - DNA, 125 bp, homo sapiens
gggactacaggcgcctgccgccatgcctggctaattttttttctttcttggaatccttattctttctttcttttttttttttcgggactacaggcgcctgccgccacgcctggctaatttttttt

SEQ ID NO: 4512 - DNA, 92 bp, homo sapiens
ccattatcaacaattacctttctatctatacagtgtctctctctctctctctctatccatcttccattatccacaattacctttctatctat

SEQ ID NO: 4513 - DNA, 158 bp, homo sapiens
agctagatacagagtgtggacataaaggttctccaaggccccaccagagtagctagatacagagtgtcgattggtgcattcacaaaccctgagctagacacagggtactgattggtgtgtttacaaaccttgagctagatacagagtgccgattggtg

SEQ ID NO: 4514 - DNA, 164 bp, homo sapiens
ttaatttacaattttgatttatttgtatctatattaaaagagtgggtataaaattatataaactgtgatcgttagggtcatacaatttcatatcagttttagagcttttttaacttacaattttgatttatttgtatctatattaaaagagtgggtataaaatt

SEQ ID NO: 4515 - DNA, 102 bp, homo sapiens
actttcatccattagggtattaaatttctgggcatagagttgtttggcagtttgtgtctttcagactttcatccattagggtattaagtttctgggcataga

SEQ ID NO: 4516 - DNA, 126 bp, homo sapiens
agcattgcaattgccccatatatggctaacagatacatagtagataaataattaaattaatagtagcagtattgcaattgtagcattgcaattgccccatatatggctaacagatacatagtagat

SEQ ID NO: 4517 - DNA, 83 bp, homo sapiens
aaaagagatatatgattaaaatgacagccaagaaaactaaaactaggaaataatttaaaagaaatatatgattaaaatgacag

SEQ ID NO: 4518 - DNA, 114 bp, homo sapiens
ttaatcagtagatcactgacagtaaagctctaacctatagaactgaccctgtggagtcccttagttcaagaaaaaaaatacttccagttaatcagtagatcactgacagtaaag

SEQ ID NO: 4519 - DNA, 135 bp, homo sapiens
ttttcagttctcctgtagagatcttttaccttcttggttagatgtattctaaaaaaggaatggaaaatcctttttttcagcagtgtttttcagttctcctgtagagatcttttaccttcttggttagatgtattc

SEQ ID NO: 4520 - DNA, 95 bp, homo sapiens
atactttcaaaattcatagtggttaccaccttcactctccagcacaccttaccctactctacatactttcaaaattcatagtggttacgaccttc

SEQ ID NO: 4521 - DNA, 88 bp, homo sapiens
catctgtaagcatcaacaacatccaggaaacatctataaacaacatccaggaaacatatataaacatctgtaagcatcaacaacatcc

SEQ ID NO: 4522 - DNA, 108 bp, homo sapiens
agaactcaactagctgggatagagaaataaaaattttattttaatgacaaataattgttcacacacttttacatcagttgagaactcaactagctgggatggagaaat

SEQ ID NO: 4523 - DNA, 104 bp, homo sapiens
tgtggtacatccatatcatacaatactactacacccctttatggacatctaggttgtcagatgacctagatggatgtggtacatccatatcatacaatactact

SEQ ID NO: 4524 - DNA, 79 bp, homo sapiens
gacagttaatgaagttaaagtgtatgtaaaactgtagaaatatactataaaataggacagttaatgaaggtaaagtgta

SEQ ID NO: 4525 - DNA, 107 bp, homo sapiens
tgtagaaggtaaatttatctttttttatatattcttattcacttgaatatatattattataataataatcacttgaatatattgtagaaggtaaatttatctctttt

SEQ ID NO: 4526 - DNA, 89 bp, homo sapiens
aaagaatgaggtcttgtagaaagaacaacaaagacaatttgaaaaaaaggagatcttgtagaaagaatgaggtcttgtagaaagaacaa

SEQ ID NO: 4527 - DNA, 116 bp, homo sapiens
gcaggtaaactctaagtcagaagtaaggcggcaagttttactttgttatgtaaggactgcaactttgaaaaatatattcaagttacatgcaggtaaactctaagccagaagtaagg

SEQ ID NO: 4528 - DNA, 153 bp, homo sapiens
cactctgtatctagctcaaggtttgtaaacacaccaatcagcaccctgtgtctagctcagggtttgtgaatgcaccagtccactctgtatctagctattctggaggggccttggagaacctttgtgtggacactctgtatctagctaatctgg

SEQ ID NO: 4529 - DNA, 75 bp, homo sapiens
caagtctctaggaagttccaaactttcccatatctttgtcttctgagcactccaagtctctaggaagttccaaac

SEQ ID NO: 4530 - DNA, 106 bp, homo sapiens
tcagaacttctgcactatttaatcagtaccattttttctgatccacctgttctgcatgctcacctatatctgctggcccctatcagaactttgcactatttaatca

SEQ ID NO: 4531 - DNA, 94 bp, homo sapiens
tgcataatagaagtcttgaataaagatactatagccaatgggtaataagtatgcataataagtttgcataatagaagtcttgaataaagatact

SEQ ID NO: 4532 - DNA, 130 bp, homo sapiens
ggattgataaacctaaacagctaactcaatacttactgtctacatgacatttattttgtagttaccactgcactaattaatacaaaaaaatcaaggattgataaacctaaacagctgactcaatacttac

SEQ ID NO: 4533 - DNA, 81 bp, homo sapiens
ggaaagtttggaacttcctagagacttcgggggctcagaagacaagaaaatgtaggaaagtttggagcttcctagagactt

SEQ ID NO: 4534 - DNA, 97 bp, homo sapiens
agctttataaaagctggtagtgtcataaagtgttgaaagtgaaaggatagaggaaatgccaggtaaatactagccttataaaagctggtagtgtcat

SEQ ID NO: 4535 - DNA, 98 bp, homo sapiens
tgtctaagactcatatttgacattaaccaaatgaaaaaggagaagctgttgagaataagctgttgagcattagagtgtctaagactcatctttgacat

SEQ ID NO: 4536 - DNA, 65 bp, homo sapiens
aattagttaaaaatgactaattagttaaaaaaattagttattaattttcaactaattactaatta

SEQ ID NO: 4537 - DNA, 77 bp, homo sapiens
tttaattattaaatatactattaatatatttactcataggaacacatatcgtttaattattaaatatagtattaata

SEQ ID NO: 4538 - DNA, 151 bp, homo sapiens
aaagtcaacatacatttttaaaaagaatgtacttttcccactaattctcaaagcttccccaatagaaggaagtagtgagagttctgaggcaaaaaacagcatactaaagtcaacgtacatttttaaaaagaatgtacttttcccactaatt

SEQ ID NO: 4539 - DNA, 106 bp, homo sapiens
aatacaccatgtacactataaatatataaacttttatataggaaggaaaatgtgggaaagtttatatataaatatataaatacaccatgtacactataaatatata

SEQ ID NO: 4540 - DNA, 78 bp, homo sapiens
ctctaggaagttccaaactttcccatgtcttcctgtcttctgagccctccaagtctctaggaagttccaaatttcccc

SEQ ID NO: 4541 - DNA, 99 bp, homo sapiens
ccaagttgataaaggcacttggagatatatatatatatatatatatttgattaggcacttggatatatgtatatatccaagctgataaaggcacttgga

SEQ ID NO: 4542 - DNA, 106 bp, homo sapiens
ctagacagaaagttctccaagtccccactagattagctagacacagagcactcactggtgcatttacaatctttcaactagacagaaaagttctccaagtccccac

SEQ ID NO: 4543 - DNA, 118 bp, homo sapiens
gttgcaggttcttgggcaagaggtgtttctgctgctgcgtcagtgagtgcaactattctgatcagcagggtccagggactgttgcaggttcttgggcaagaggtgtttctgctgctgc

SEQ ID NO: 4544 - DNA, 124 bp, homo sapiens
ggtctttgtatgtgtaatacatatttgtatatgtataatatacaaatatataatatatctttgtgtttgtataatatggattattatatttgtatatgtataatatatgaatatataatatata

SEQ ID NO: 4545 - DNA, 87 bp, homo sapiens
tccttcacccttagtggcaagtcccacttttctgggggaggggcaagtaccccaaccccttctccttcactcttagtggcaagtccc

SEQ ID NO: 4546 - DNA, 92 bp, homo sapiens
tgataaggtggctagacaagcagctagctttccaacttctgtctctcacagcaaggcttatgctgataaggtggctagacaagaagctagct

SEQ ID NO: 4547 - DNA, 97 bp, homo sapiens
ggtgatgtaacaactggttaatcatatggggaaaaaatacttttgttgaaaatactttgctttctcaacaaatggtgatgtaacaactggttacatc

SEQ ID NO: 4548 - DNA, 137 bp, homo sapiens
cctcttctcctcccctgctccctggctgtgatctgagtccctaggggtggtgggtaagaccccatccttgtcaagcagagtcctcctccctcttctcctcccctgctccctggctgtgatctaagtccctaggggtg

SEQ ID NO: 4549 - DNA, 104 bp, homo sapiens
tgatgtgataaggagaagggggcattcgacatggttactaataagcattatttatttatttatttagaatagtgtcattgatgtgataaggagagggggcattt

SEQ ID NO: 4550 - DNA, 153 bp, homo sapiens
ttttttttcctgtgtctgtcctcttgttcacaaggattttgctgctttagagcacatttgcttcagtatccttaacgattcgttctgatctccacacttttttttttttcctgtgtctgtcctcttgttcacaaggattttgctactttagag

SEQ ID NO: 4551 - DNA, 111 bp, homo sapiens
tagtagattaagctggtagtgtgtataaagaatagtatggtataaagaatagtatggtataaagtataaagaatagtagattaagctggtagtgtgtataaagaataagta

SEQ ID NO: 4552 - DNA, 116 bp, homo sapiens
cagcctcactgggaacagtatcttgactttcacttggaaaaggtaatggtggatccttgtgtgtgtgtgcgtgcatgtgtgttttgaccagcctcactgggaacagtctcttgact

SEQ ID NO: 4553 - DNA, 95 bp, homo sapiens
gagctcaggagttcgagaccagcctaagcaatatagtgagatacctgtctgtacaaggcaggcaaatcatgaggtcaggagttcgagaccagcct

SEQ ID NO: 4554 - DNA, 125 bp, homo sapiens
ataagtgtccatgaaatcttcacaatttatgttcagagattgcagtaaagacaggcataagaaattatagaagtattaatttggggaactaataaatgtccatgaaatcttcacaatttatgttc

SEQ ID NO: 4555 - DNA, 94 bp, homo sapiens
gtattatatcaacatgtaatggttttattattaatatgtaatgaatattaaatatttttaaaatcttgtattatatcaacatgtaatggcttta

SEQ ID NO: 4556 - DNA, 79 bp, homo sapiens
ccgccacatccagccattttttttttgtgtgtatatatatagatagatagatagatccgccacatccagccattttttt

SEQ ID NO: 4557 - DNA, 101 bp, homo sapiens
tcactctgttgcccatgctggagtgttgttcctctgtcttcttttttttttttttttttttttttgagacagggtctcactctgttgcccaggctggagtg

SEQ ID NO: 4558 - DNA, 98 bp, homo sapiens
gtacaccctccaagttattgagttcactcaaggggtgtgtgtgtgtgtgtgtgtgtgtgtgtgtgtgtgtgtgtacaccctccaacttattgagttca

SEQ ID NO: 4559 - DNA, 91 bp, homo sapiens
tgcctttattggcactttggttttgcttttgattttgacttggtttgattgcttgatgaatgagcatgcctttatcggcactttggttttg

SEQ ID NO: 4560 - DNA, 102 bp, homo sapiens
attcctcaggactcaattccagaattctcaattctctcaattctcaattcctcaattctctcaattctcaattcctcaattctctcaggactcaattccaga

SEQ ID NO: 4561 - DNA, 111 bp, homo sapiens
taaccaaaacagcatggtactggtacaaaaacagacacatgaggagtgaaacagaatagagagggctacaataaccaaaacagcatgatactggtacaaaaacagacacat

SEQ ID NO: 4562 - DNA, 68 bp, homo sapiens
ataattgtgcagcaagtggggttgccaattaaattgtgcagtgataattacgcagcaattaggggtgt

SEQ ID NO: 4563 - DNA, 101 bp, homo sapiens
ggaggcctcctctggggcttctaaatggtgactccctgtgggtaccagaggagagggagtgaaggaggcctcctctggggcttctaaatggtgactccctg

SEQ ID NO: 4564 - DNA, 108 bp, homo sapiens
ggcagtaccatgcttccccacctctcctatgctctccacttgcttccttcccagtcaaagggctctgctggagttctgcagggcagtgccatgcttccccacctctcc

SEQ ID NO: 4565 - DNA, 73 bp, homo sapiens
cagattagctagatacagagtgtggacacaaaggttctccaaggccccaccagagtagctagatacagagtgt

SEQ ID NO: 4566 - DNA, 82 bp, homo sapiens
ttacagcctaactactaatacttaagtaatagtcttaagtattagtgttagttcttacagcctaactactaatactcaagta

SEQ ID NO: 4567 - DNA, 88 bp, homo sapiens
ttttttttttcattctcctaaggtagttttatgttgagattattcattcatggcctctcctattttttttttctttctcctaaggtag

SEQ ID NO: 4568 - DNA, 130 bp, homo sapiens
tggcaaaatttccttaaatgaattcttgtcagatagacctttttaaagattgtaattgtgtggtaaaattaagttaaataggtttaacactcctggcaaaattaccttaaatgaattcttgtcagataga

SEQ ID NO: 4569 - DNA, 98 bp, homo sapiens
ttcagctctcagcatagaggagaccctgtggtgggtagctcctctctgcagctggttgtcccgtcaagtgttcagctctcagcagagaggagaccctg

SEQ ID NO: 4570 - DNA, 90 bp, homo sapiens
attacagtctatctaccacacctaagggacttcaaaattctgtgggaagaagtgtattaagaagaattacagtctatctaccacatctaa

SEQ ID NO: 4571 - DNA, 95 bp, homo sapiens
aaccaatcagaggctgaagtgaaattacaaaggtcacactcctatgcaaacatctgattggttgtgggaagcaaccaatcagaggctaaagtgaa

SEQ ID NO: 4572 - DNA, 80 bp, homo sapiens
tattctgcagaaagacaaatatccttcaaatatttgtccctcaaatatccctcaaatattctgcagaaagacaactatcc

SEQ ID NO: 4573 - DNA, 123 bp, homo sapiens
gaacataaattgtgaagatttcatggacatttcttaattccccacattaatgtttttataatttcttacgcctgtctttactgcaatctctgaacataaattgtgaagatttcatgaacattt

SEQ ID NO: 4574 - DNA, 106 bp, homo sapiens
ttcctgatcttagagtaaaagccttcagttttttaccttcagtggccaggtgagcatccttgcctttttcctgatcttagagtaaaagccttcagttttttacctt

SEQ ID NO: 4575 - DNA, 94 bp, homo sapiens
ttttttattgctgagtggtatttccaggtatggatatgccacagtttgtttatatatcaatagctcatattttttattgctgagtgctatttcc

SEQ ID NO: 4576 - DNA, 106 bp, homo sapiens
agtactctcttggaggtgataatgtactcttttggagtactctcttggaggtgataatgccccattatcacctcttggtgatagtactctcttggaggtgataatg

SEQ ID NO: 4577 - DNA, 127 bp, homo sapiens
ttccaaaagagaagagaagggaagagaagagaagagaagagaagagaagagaagagaagagaagagaagagaagagaagagtagagtaggaggaagaggaagagaagagaagagaagagaaggagaa

SEQ ID NO: 4578 - DNA, 121 bp, homo sapiens
agagtaacaggcattcacaggcaggttagaagagagagagaaaggccagaggtgggggctgtgactggaaatgccaacacagagtaacaggcattcacaggcaggttagaagagagagaga

SEQ ID NO: 4579 - DNA, 97 bp, homo sapiens
gcaggagaatcacttgaacccagtgggcggaggttgcggtgagtcaagattgcaccattgcactccagcctgaggcaggagaatcgcttgaacccag

SEQ ID NO: 4580 - DNA, 91 bp, homo sapiens
gcatttacagggacctataagagcaaagagtcactttacttttctttcctcgggacccaaggggcatttacagggacctatgagagcaaag

SEQ ID NO: 4581 - DNA, 101 bp, homo sapiens
cacgaggtccccgaccacctcgccacactttcatcagacgctctctctaccctgctgaggttatcagcatcatgtcacatgaggtccccgaccacctcgcc

SEQ ID NO: 4582 - DNA, 74 bp, homo sapiens
tgtaaattagcacacctactatgtatgtgtgctaatttatgtacgtacaaatgtaaattagcacacctactatg

SEQ ID NO: 4583 - DNA, 81 bp, homo sapiens
tatttttagtagagaagggatttcaggcgtttgccaccatgcctggctaatttttgtatttttagtagagacgggatttca

SEQ ID NO: 4584 - DNA, 107 bp, homo sapiens
agccatgatcatgccactgcactccagcctgggtgacagagtgagaccctatctcaaaaaacaaacatgcagtgagccatgatcatgccactgcactgcagcctggg

SEQ ID NO: 4585 - DNA, 106 bp, homo sapiens
tatttactggtgttcgtggaataggttaatatacacatttttaaacatgggattttatgttatatgtgctgtaatatttactggtgttcatggaataggttaatat

SEQ ID NO: 4586 - DNA, 169 bp, homo sapiens
ccctagattttctttctctctctttccttccttctttccttccctccctccctccctcccttctttttctctttctttctttctttctttctttctttctttctttctttctttctttctttctctctctctctctctctttctttctttctttctttctttcttgtct

SEQ ID NO: 4587 - DNA, 109 bp, homo sapiens
agtttacatatatgtatattctttcatctttatatatatgcatgttatttcatttaaaaaaacccacatatagacatgtgcgagtttacatgtatgtatattctttcat

SEQ ID NO: 4588 - DNA, 128 bp, homo sapiens
cagctacttgggaggctgaggcaggagaattgcttgaagctgagaggcagaggttgctgtgagctgagatcgcaccactgcactccagtgcagctacttgggaagctgaggcaggagaattgcttgaa

SEQ ID NO: 4589 - DNA, 139 bp, homo sapiens
attttgaagatagcttatctagtctaccttatactgaagacagcttacctatcttacgtagtctaccttacactgaagatagcttacctaggaataaacttaaaaacaaagaagatactgaagagagcttacctatctt

SEQ ID NO: 4590 - DNA, 100 bp, homo sapiens
gttaagcaagagatgattgcttgggccaagagtgaatgcagggaggaagactagttgaaactatggttgtgttaagcaagagatgattgcttggaccaag

SEQ ID NO: 4591 - DNA, 274 bp, homo sapiens
cagattagctagatacagagtgtccacacaaaggttctccaaggcgccaccagagtagctagatacagagtgttgattggtgcattcacaaaccctgagctagacacagggtgctgattggtgtgtttacaaaccttgagctagatacagagtgccgattggtgtatttacaatccctgagctagacagaaaggttctccaaggccccacccgagtagctagatacagagtgtggattggtgcattcacaaaccctgagctagatgcagagtgc

SEQ ID NO: 4592 - DNA, 173 bp, homo sapiens
tttctagtgggcctgtcctggttgccgggggagacaggatggcttaagggagctgtggaatgcaacggtgatttttctagtgggctgtcctggttgtaggggacatggtttttcagaggtggtttttctagtggggctgagaggtggtttttttagtgggtctgtcctggttg

SEQ ID NO: 4593 - DNA, 67 bp, homo sapiens
taattcctctctttagcgattgttacaatagatactataaattaattcctctctttagcagttgtta

SEQ ID NO: 4594 - DNA, 77 bp, homo sapiens
agtgtagaaatagtcttagtaattacctctaagtggtatactaagctgatacagtgtagaaatagtcttagtaatta

SEQ ID NO: 4595 - DNA, 102 bp, homo sapiens
aattcatatataaatcgtgtttttcctattataaaaagcagagattaggaacaattctgtctacatatagcaaaaattcatatataaattgtgtttttccta

SEQ ID NO: 4596 - DNA, 89 bp, homo sapiens
aattcacttttgccataaatgggggtaaaaaagtatggcgtgatttaaatttttttaaattcacttttgccataaattggggtaaaaaa

SEQ ID NO: 4597 - DNA, 96 bp, homo sapiens
cccccagcccccaccctcatgttgtctctccctggggaccatgttgcttcttctctctagggtttcccccagcccccaccctcatgttgtctctcc

SEQ ID NO: 4598 - DNA, 114 bp, homo sapiens
ccagccacagccgcttctcttggagccctgcgctggcccacgtctgctcctgcagtctgcctctgagcccactgcctgtgtcgaggccagccacagccacttctcttggagccc

SEQ ID NO: 4599 - DNA, 156 bp, homo sapiens
ctccaccgtcgcccggggtctccaccaagcgcagtctcagaatgcccaagagccccaccgtcgcccggggtctccaagaggagtgggtcgtggtgggcgttgaagggccgtaaaagacgagcagcccgcgtccgcgtccgtcctcccgggtctcca

SEQ ID NO: 4600 - DNA, 125 bp, homo sapiens
ataaatgtccatgaaatcttcacaatttatgttcagagattgtagtaaagacaggcttaagaaattataaaagtattaacttggggaactaataaatgtccatgaagtcttcacaatttatgttc

SEQ ID NO: 4601 - DNA, 125 bp, homo sapiens
gaacataaattgtgaagacttcatggacatttattagttccccaagttaatacttttataatttcttaagcctgtctttactacaatctctgaacataaattgtgaagatttcatggacatttat

SEQ ID NO: 4602 - DNA, 126 bp, homo sapiens
gaacataaattgtgaagatttcatggacatttattagttctccaaaattaataattttgtaatttcttatgcctgtctttactgcaatctctgaacataaattgtgaagatttcatggacacttat

SEQ ID NO: 4603 - DNA, 80 bp, homo sapiens
aaacaagtgattctatttggaaggttgaatctatatgagttccacctgccctaaaaacaagtgaatctatttggaaggtt

SEQ ID NO: 4604 - DNA, 99 bp, homo sapiens
ccccaatagctatgaccttcttacaataagggaccatcctgcaagtaaggatgtaaagtatgagtctatttttgccccagtagctatgaccttcttaca

SEQ ID NO: 4605 - DNA, 145 bp, homo sapiens
tctgggagttcaagaatctcaggtttgttggaggtcaccaacaacatcatctcatcagtgggaaggaagttgcttccactgacctgaagggttcagggacttctgggagttcaaggatctcaggtttgttggaggtcaccaacaa

SEQ ID NO: 4606 - DNA, 124 bp, homo sapiens
ataaatgtccatgaaatcttcataatttatgttcagagattgcagaaagacaggtgtaagaaattataaaagtattaatttggggaactaataaatgtccatgaaatcttcacaatttatgttc

SEQ ID NO: 4607 - DNA, 127 bp, homo sapiens
caaggctggttcaacatacacaaatcaataaacgtaatccatcatataaatagaaccaaagacaagttggcttcatccctgggattcaaggctggttcaacatacacaaatcaataaatgtaatcca

SEQ ID NO: 4608 - DNA, 116 bp, homo sapiens
tgttgttacaaaattaaaagaggtaatgtgtataacagctatctcaataaatagcagatgttttaattccaatgtgcctacttcacactgttgttacaaaattaaaagagataatg

SEQ ID NO: 4609 - DNA, 125 bp, homo sapiens
gggacactgctaaaccatatcaatcccctacaaagcccacaacatgtgggaattatgggagctacaattcagatgcgatttgggttgggacactgctaaaccatatcgatcccctacaaagccca

SEQ ID NO: 4610 - DNA, 107 bp, homo sapiens
gtccgttttgacagagtgctgattggtgcatttacagtcctttagctagaaacaaaagttctccaagtccccaccagattagctagacatagagcactgattggtgc

SEQ ID NO: 4611 - DNA, 91 bp, homo sapiens
agcatgttggtaaaattgcttgaggggtttactttctgtgatttctaaactaagatcaaattagcatgttggtaaaattacttgaggggtt

SEQ ID NO: 4612 - DNA, 112 bp, homo sapiens
tttccttttctctgccttctttgtattacctttcctttatttcagtagagtataaattttttcataaaatctaattctttcatagtttccttctctctgccttctttgtatt

SEQ ID NO: 4613 - DNA, 75 bp, homo sapiens
ttcttttccaaaacacatcctaaggaccagcatggctggtgtcgtctaccattttttttccaaaacacatcctaa

SEQ ID NO: 4614 - DNA, 75 bp, homo sapiens
aatgtcatcagttaaggcaggaacaggccattttcacttcttttgtagtggaatgtcatgagttaaggcaggaac

SEQ ID NO: 4615 - DNA, 83 bp, homo sapiens
tataatttctcagtttatcatcctcatctgcatctgaagttttatttctacatactataatttctcagtttattatcctcatc

SEQ ID NO: 4616 - DNA, 108 bp, homo sapiens
caccaatcggcactctgtatctagctcaaggtttggaaacacaccaatcagcaccctgtgtttagctcaaggtttgtaaatgcaccaatcgacactctgtatctagct

SEQ ID NO: 4617 - DNA, 97 bp, homo sapiens
ggtggcgcacgcctgtaatcccagctacacacacacacacacacacacacacacacacactagccgggcgtggtggcgcacgcctgtaatcccagct

SEQ ID NO: 4618 - DNA, 107 bp, homo sapiens
cactgcactccaacttgggtgacacagtgacagcttgggtgatgctgcactccagcttgggtgacagctgcacaagattgtgccactgcactccagcttgggtgaca

SEQ ID NO: 4619 - DNA, 89 bp, homo sapiens
cccaggagcagagctcctggtgcctgcagaaaaaaagacacaaagcaatgtcattctctgtccccaggagcagagcccctggtgcctgc

SEQ ID NO: 4620 - DNA, 117 bp, homo sapiens
gccgcctgtccacgctgctggagcaccggcacatgcacacgggtgagcggcccttccagtgcacgcaatgtggctgctgcttcagccgcctgtccacgctgctggagcaccggcaca

SEQ ID NO: 4621 - DNA, 118 bp, homo sapiens
gctcacacctgtaatcccagcacttttggaggctgaagcaggaggattgcttgaggtcaagagtgagagatggccgggtgcggtggctcacacctgtaatcccagcactttgggaggc

SEQ ID NO: 4622 - DNA, 159 bp, homo sapiens
gctgtcactggatcctttatagtgagccctcatcacagtcacaggatccttcacagtgagccctgattgtgctgtcactggatccttcgcagtgagccctgaccatgctgtcactggatcctttgtagtgagccctcatcacagtcacaggatccttca

SEQ ID NO: 4623 - DNA, 89 bp, homo sapiens
caggaatgtcaaacaccacgacagaataacaatcctattttcctcaccaccttctccttttgtccccaggaatgtcaaacaccatgaca

SEQ ID NO: 4624 - DNA, 176 bp, homo sapiens
gccgtcctcccatcccagccctgccatcctcccacacgcacgctgccgtcctcccatccgcgccccgccgtgcctaggtggagaggcggcagggcttcccggagagccgtcctcccatccgcgacccgccgtcctcccatccacatgccgccatcctcccatccacgcaccacgtc

SEQ ID NO: 4625 - DNA, 143 bp, homo sapiens
gtacacagtgaacgacacagtccacaattacctgatacctcggtatggggctctagggaaactttcttctcttttgctgccttacctaaattcctgatagtacacagtgaacggcacagtccacaattacctgatacctcggt

SEQ ID NO: 4626 - DNA, 87 bp, homo sapiens
cactgaccagtacctctttaaggcactaaccttatattgctagtctttgcttttgtacctcactgaccagtacctctttagggcact

SEQ ID NO: 4627 - DNA, 96 bp, homo sapiens
gccttctcactgtgtcctcacatgatggaaaggtctggtgaggacccatgttcatagacagcgccttctcactgtgtcctcacatgatggaaaggt

SEQ ID NO: 4628 - DNA, 106 bp, homo sapiens
ctgcatctgagggggcagactgctggggggacactgggtcactgtgtttgaagggatgtctactggtagggtgactggcttcctgcatttgagggggcagactgct

SEQ ID NO: 4629 - DNA, 153 bp, homo sapiens
gccaggcaggagaaggaggggggatgcctggcagtgggagaagggaagccaggcagggggaggagggggaagccaggcagggggagaagggatgccaggcagggaggagaagggatgccaggcagggggaggagggggatgccaggcaggggg

SEQ ID NO: 4630 - DNA, 102 bp, homo sapiens
atggaaagaccagaggcaacgaaagcctaagaaaggagcttacttatcccttttcagtccggagattggaaagaggatgatggaaagaccagaggcaaagaa

SEQ ID NO: 4631 - DNA, 112 bp, homo sapiens
tcctcctagaccacaaggaggaccgaggaaggtcggatttagtggcccttaccaatgcattctcaaaaatctgcacccttgcctgtcctcctagaccacaaagaggaccgag

SEQ ID NO: 4632 - DNA, 96 bp, homo sapiens
tccttcagtacaggaatgttttatagcagctttattcatgattgctgaaacctggaagcaagcaagatgtcctttagtacaggaatgttttatagc

SEQ ID NO: 4633 - DNA, 95 bp, homo sapiens
ttgtagtagaggcagggtttcaccgtgttgtccggctaatttttgtgtgtgtgtgtgtgtgtgtgttgtagtagaggcagggtttcaccgtgttg

SEQ ID NO: 4634 - DNA, 104 bp, homo sapiens
gggcacagcctgagagcacagaggcaggaaggatatgagagtcggagaaggcacactgtctcttcctggagggcacagcctgagagcatagaggcaggaaggat

SEQ ID NO: 4635 - DNA, 82 bp, homo sapiens
gtctttctgtgtcctggttgtcacagactcctgggaagttggagctaatgtgaacccgtctttctgtgtcctggttgcacat

SEQ ID NO: 4636 - DNA, 85 bp, homo sapiens
gtagaaagctgagatggaccaaaagctaggatgataaagcttagtgaggaaggcatgtagaaagctgagatggaccaaaagctag

SEQ ID NO: 4637 - DNA, 131 bp, homo sapiens
gactcatccctgctctgttgggaccaatgggatgcgtcttggccaacagcatgacatggccatgtggcctgcagggcctctgtggagatacggactcatccctgctctgttgggaccaatgggatgagtct

SEQ ID NO: 4638 - DNA, 87 bp, homo sapiens
cttcctcttccactgtgaggggttcacgtgattcactcgggccttcctggataattctgccttcctcttccactgtgaggggttcac

SEQ ID NO: 4639 - DNA, 140 bp, homo sapiens
gacaggaggcaacttacagctgtttctactacgggcttgagttaagatgggtcctcatccactgctgacccagcccatccactgctgacaggaggcaacttaacagctgtttctactacgggcttgagttaagatgggtc

SEQ ID NO: 4640 - DNA, 107 bp, homo sapiens
tgatattttctgttctgggtggtgttacctggaggagggggcattatggtggtttctggagtgatggtaatatgatattttctgttctgggtgtgttacctggaggt

SEQ ID NO: 4641 - DNA, 97 bp, homo sapiens
ccgccccagactcccatcacaaaaaccgcattcggggtctgttgcccgcagcacccacagttatcccgccccagactcccatcacaaaaaccgcatt

SEQ ID NO: 4642 - DNA, 112 bp, homo sapiens
ctgtgtctgcagtcaggcccagtggaaccccaaaggcatgtctgacccgaacccccgcccctccataggtccctgtactgtgtctacagtcaggcccagtggaaccccaaag

SEQ ID NO: 4643 - DNA, 76 bp, homo sapiens
gatcctcctcatgggccagggtcaccatacgtgggcaccaaccttcccaaactgatccttctcatgggccagggtc

SEQ ID NO: 4644 - DNA, 83 bp, homo sapiens
tcaggtgtgtggggctgtcaggctgagagtgtcagtccagttgaaaagagagaagcatcaggtgtgtggggctgtcaggctga

SEQ ID NO: 4645 - DNA, 96 bp, homo sapiens
ggagcacagagcaggaagggctgtggaagaggcacctggggagtgggggacattggtccttgggagcacagagcaggaagggctgtggaagaggca

SEQ ID NO: 4646 - DNA, 96 bp, homo sapiens
ggtgaagacctggttgaaccaagaaatctctgtgggttgtttgtttccctctggcccgcagcgttgcccatggtgaagacctggttgaaccaagaa

SEQ ID NO: 4647 - DNA, 144 bp, homo sapiens
gccagtgcggggaacgtggcctgcatcagcaaacgctcagaggtgaggtctggtcatgctccaaaggccacactcgccatcacgacacggtgtggcctcagccagtgcggggaactgtggcctgcatcagcaaacgctcagagg

SEQ ID NO: 4648 - DNA, 90 bp, homo sapiens
ttttttttgagacagagtcttgctcccaggccagaatgcatagttttttattttttttttttttttgagacagagtctcgctcccaggcc

SEQ ID NO: 4649 - DNA, 101 bp, homo sapiens
gacccggagatgaggccccttcctgacttgcgcacacggacctggagatgaagccccttcctgacttgcgcacacggacccggagatgaggccccttcctg

SEQ ID NO: 4650 - DNA, 91 bp, homo sapiens
aatcctccttgtctacctggagaaaggagagggctttggtctatgttgctgagcttgcgaatcctccttgtctacctggaaaaaggagagg

SEQ ID NO: 4651 - DNA, 103 bp, homo sapiens
agccaagctgatcctggacgtgcacccaggcttgccatccctgcaatctgcgaccgttgacgacagccaagctgatcctggacgtgcacccaggctttccatc

SEQ ID NO: 4652 - DNA, 99 bp, homo sapiens
atatatatatatatacacacacacacacacacacatgcactatatatatacacacacacacatatgcactttatatacacacacacacacacacacaca

SEQ ID NO: 4653 - DNA, 108 bp, homo sapiens
agcctaggagtgtcaggcccggggtgcagccgtggaggctgtgggggtggcatgtcgggggaggtcgaggactcactttgggaagcctaggagtgtcagtcccggggt

SEQ ID NO: 4654 - DNA, 91 bp, homo sapiens
ctgtaacgctaccacacaggcaagaaattctatttctttccttggataaaaacgaaagcatacttagctgtaacgctaccacacaagcaag

SEQ ID NO: 4655 - DNA, 77 bp, homo sapiens
catgcacaggttaccacgtgtacggtttgcgcataaacaatcctgcatctttgcatgcacaggttaccacgtgtatg

SEQ ID NO: 4656 - DNA, 166 bp, homo sapiens
tccctgcactgagcgggcgtggggaaggttcccaggatccctgcactgagcggggtgggggagactccccacggttccctgcactgagcgggcgtggggaaggttcccaggatccctgcactgagcgggcgtggggaaggttcccaggatccctgcactgagcggg

SEQ ID NO: 4657 - DNA, 90 bp, homo sapiens
gggctggaagtaccttcctcctggctctcgttcctgagtggggatttgtctctcattccctgggctggaagtaccttcctcctggctctc

SEQ ID NO: 4658 - DNA, 75 bp, homo sapiens
gtctggagggaagaggctgcctgacaggcaggtgttctgggtgaactcacccgtctggagggagaggctgcctga

SEQ ID NO: 4659 - DNA, 97 bp, homo sapiens
gcctcatgtctaagactccccacgccgtctgcgcatgctgccgctctgccaaacctgtccttctcccaccacaggcctcaagtctaagactccccac

SEQ ID NO: 4660 - DNA, 114 bp, homo sapiens
cttgaaggggtcagtctatgtgcgagacaaagttattgtccagctcttcaccaaccaaacgtgctcacaaggaacggagcttggaggggtcagtctatgtgcgagacaaagtta

SEQ ID NO: 4661 - DNA, 82 bp, homo sapiens
tgttttagggttttgtatgtattatttcagagctccgtgctgtttctggacacgtgttttagggttttgtatgtattatttc

SEQ ID NO: 4662 - DNA, 99 bp, homo sapiens
agagaaccttgtaatgaatggaccactcactgagccaggctgtgcttgtgttatctgtggtggagagaaccttgtaatgaacggaccactcactgagcc

SEQ ID NO: 4663 - DNA, 124 bp, homo sapiens
gggggctgtgggcccgcttggccagttgaggcagcagaatgcacctgcccccgaggtgagacctctgtcctccccacctgagtgcgggggctgtgggcccgcttggccggttgaggcagcagaa

SEQ ID NO: 4664 - DNA, 134 bp, homo sapiens
tgcagctgctccagagaatgccaaggtcccagccaaaaagctctagatgattctagactgtgcacggagcttccattctgtaactgcagctgctccagagaatgccaaggtcccagccaaatagctctagatga

SEQ ID NO: 4665 - DNA, 124 bp, homo sapiens
tgtgtcacttgcttttatgtggaatgtgggcagttcttaaaactttattttaatgcacacgttcagtccctgcagcacctcccgaagtgtgctgtgtcacttgcttttatgtggaatgtgggca

SEQ ID NO: 4666 - DNA, 111 bp, homo sapiens
accctcctgaaggtaggagctgaccacaagtcctcctcccaaggcaggggcgagctcagcttgccgacggctgccagagagtcaccctcctgaaggtagaagctgaccaca

SEQ ID NO: 4667 - DNA, 86 bp, homo sapiens
tcagacccgcctggttacccgcccccatcattaatcatcaccaggcttccttccctgggttcagacccgcctggttaccgcccccc

SEQ ID NO: 4668 - DNA, 104 bp, homo sapiens
agattttcagcgatattatggaagcattgcctctctgataccagcatggtaaggtttgcacacacaggggcttgatagattttcagtgatattatggaagcatt

SEQ ID NO: 4669 - DNA, 212 bp, homo sapiens
taatgggttatttttgttggtatttgggtgggtcgaatgctcactgctggtcctgtcctgctctaaaatgttcagatatgtaatgggttatttttgttggtatttgggtgggtcaaatgctcactgctggtcttgtcctgctctaaaatgttcagatatgtaatgggttatttttgtcggtatttgggtggtatttttgctctatgacctcc

SEQ ID NO: 4670 - DNA, 156 bp, homo sapiens
agaaagctcctccaagatgccaccgcgtgtgaaatgcttggggttgaatctcgagagcagggagaccagccagacagcccacctggctgacgagacccggcctcgcttagaaagctcctccaagatgccaccgcatgtgaaatgcttggggttgaa

SEQ ID NO: 4671 - DNA, 106 bp, homo sapiens
cgttaatgcagcagggatccagagaagggtctccggacatcactgatgcccccagctctccccacacctgccattccctgcgttactgcagcagggatccagagaa

SEQ ID NO: 4672 - DNA, 109 bp, homo sapiens
gtgctggctttgcacccccctcctgccacgtcccgtgcaaacgctcaggtgtgtggcatgcctggggccctttgcattggtgctggctttgcacccacctcctgccacg

SEQ ID NO: 4673 - DNA, 116 bp, homo sapiens
cctggagttataaatgtcttatgtatttgcttagtgtccacagtgtctcttcctttcacagtgtcttcttgtttttcctggagttatacatgtcttatgtatttgcttagtgtcca

SEQ ID NO: 4674 - DNA, 93 bp, homo sapiens
gggaaacggggtgtgaaagagagatgaggaaagggggtctgaccggtgcccagcagggtcagggagaggcgggacacggggtgtgaaagagag

SEQ ID NO: 4675 - DNA, 102 bp, homo sapiens
ctggtttctctgcagaaccctaatacaagtatctcacacacacacacacacacacacacacacacacccttcctactggtttctctgcagaaccctaataca

SEQ ID NO: 4676 - DNA, 100 bp, homo sapiens
aatctgctagaagggagggtgggtagacagccaccagccttgtttataaattcaaacaaaataagaatctgctagaagggagggtgggtagacgccaccc

SEQ ID NO: 4677 - DNA, 113 bp, homo sapiens
tagtcccagccacttgggaggctgaggcacacatacacacatacccaaaacacaaaaattagctgggtgtggtggtgtgcacctctagtcccagccacttgggaggctgaggc

SEQ ID NO: 4678 - DNA, 111 bp, homo sapiens
cgcgggacgccccttaatccagcgccaaaggatcccagagctcgcgggacgccccttaatccagagccaaaggatcctagagcccgcgggacgccccttaatcccgcgcca

SEQ ID NO: 4679 - DNA, 101 bp, homo sapiens
cttcaacactcagcttagagacgcttatcaaaacataacggatatttaatcataattttcacccttcttacgacttcaacactcagcttagagccgcttat

SEQ ID NO: 4680 - DNA, 103 bp, homo sapiens
tttttacagagtgccgattggtgcgtttacaaacctttagctagacgcagagcgctgattggtccgtttttacagagtgctgattggtgcgtttacaaacctt

SEQ ID NO: 4681 - DNA, 124 bp, homo sapiens
tgtaccctgtgttgttggagtgtgttactatggcgtggtgatacgcggttaggttaagcatgaagctctgttgtaccggggttgtagggctgtaccctgtgttgttggagtgtgttactgtggc

SEQ ID NO: 4682 - DNA, 65 bp, homo sapiens
ctggcactgctgaggctgaaggaccacctcccaccgggtgctggtgcggctgaggccgagggacc

SEQ ID NO: 4683 - DNA, 258 bp, homo sapiens
catgcatacatggtaacatggagcacaccgaaacatgagacaacaaacacattcacaaacatggcgacatacacatgcatacatggtgacacggcacacatacataacacacacgtttccatagtggcatacacatatgcatgcatacatggtgacatggcacacacgcacacggtgacacaacacacacacaaacatgctgacatggcacacacacacaaggtgaaacaacacacaagcatggtgacatggcacaca

SEQ ID NO: 4684 - DNA, 231 bp, homo sapiens
taaaagcaccaatcagcactctgtgtctagctaaaactttgtaaatgcaccaatcagcgctctgggtctagctaatctggtgggggacttgaagaacttttgtgtccagctaaaggattttaaatgcaccaatcagcactctgtctagctaaaggtttgtaaatacaccagtcagcactctgtcaaaacggaccaatcagctctctgtaaaatggaccaatcagcaggata

SEQ ID NO: 4685 - DNA, 231 bp, homo sapiens; identical to SEQ ID NO: 4684

SEQ ID NO: 4686 - DNA, 280 bp, homo sapiens
gtatacaccctgtgatgttgtttgtaacatcctaagatgttacccttaatgtcacatggggtgtacaccctgtgatattactcggaatatcttatggggatgctactcctaatgtcacaggctgtgtacaccctgtgatattattcggaatatccacagagacgttacttttgatgccacgactgggtccacgctttgatattttttgtcatatcttagggaggtattacttcgaatatcagagtggttgtacacccactgtgatgttattcgcaatacc

SEQ ID NO: 4687 - DNA, 126 bp, homo sapiens
tcatttacaaaggatcctcaataagtttgacagcagatagtgcattataatccatggatgccagaagagcttaggaaaaaggcaatgcatcatttacaaaggatcctcagtaagtttgacagcaga

SEQ ID NO: 4688 - DNA, 115 bp, homo sapiens; identical to SEQ ID NO: 5

SEQ ID NO: 4689 - DNA, 81 bp, homo sapiens
aaagactccatctcaaaaacaaaacaaaagaaaacaaaacaaaaaaccacaaaaaaaaagactccatttcaaaaacaaaac

SEQ ID NO: 4690 - DNA, 84 bp, homo sapiens
tttcctggtgtctctgcgtagccgtgtgcggttcctggctggtgtcgttcctctgtttcctggtgtctctgcgtagccctgtgc

SEQ ID NO: 4691 - DNA, 95 bp, homo sapiens
caccgtcgtggtgcctggctgctgtcagcacagagcattagctctgagacacctcctccttgtacccatgacactgtcgtggtgcctggctgctg

SEQ ID NO: 4692 - DNA, 119 bp, homo sapiens
gcatcaggtatcagctttccacatcacacactgcacaaaaacctaccaaagaaaccatcacagcaaaaaacactgagcatcaggtatcagctttccacatcacacactgcacaaaaacc

SEQ ID NO: 4693 - DNA, 82 bp, homo sapiens
gcccaggacagacggaaaccagtgtggaaaccagtgtggagccaccgtggtgctgcccaggacagacggaaaccagtgtgga

SEQ ID NO: 4694 - DNA, 103 bp, homo sapiens
ccactttctgcagggtcggagggttggttcaggacttccttctcagcatttcccagcctgcacagtccactttctgcagggtcggagggttggttcaggactt

SEQ ID NO: 4695 - DNA, 113 bp, homo sapiens
catcccctggtccagccaccgggctcctcccatgtgcctggccctgtcacctcttcaccttctccaccttctgcaactcacatccatcccctggtccagccaccgggctcctc

SEQ ID NO: 4696 - DNA, 98 bp, homo sapiens
caccgtcctcctccctggtgtctttaccgtcttcctccccggcccgtgtcaggtcttcctcaatggtgtccacaccgtcctcctccctggcgtcttta

SEQ ID NO: 4697 - DNA, 92 bp, homo sapiens
cccacccctcacaaaagctctggcccctcacagcacccacccctcacagctcccacccatcacagcacccagccctcacaaaagctctggcc

SEQ ID NO: 4698 - DNA, 105 bp, homo sapiens
gggatcccccacgacatccaagttctcagatgaagcccagggccagactcacccctcatcagttagggaatggtgggaccccccacgacatccaagttctcagat

SEQ ID NO: 4699 - DNA, 144 bp, homo sapiens
taggtagcaaaccacaggttatccgggctgtgtcataatgtctgtgaatgagacgggtggtctgtgtcagtcttggcggacaggctttctctcctgtgttaggtagcaaaccacaggttatctgggctgtgtcataatgtctgt

SEQ ID NO: 4700 - DNA, 126 bp, homo sapiens
tattgataattatgttgataatggtgaaagtgtaggcacgtgtgggtgattgcttgctattggtgtattgatagttgataatggtgaagatgtattgataattatgttgataatggttaaagtgta

SEQ ID NO: 4701 - DNA, 106 bp, homo sapiens
aggttattaagaaacaggagttttagcacaggtaaatttaattacctacattgaagttagccatctgtattaacaggttattaagaaacaggagttttaacacagg

SEQ ID NO: 4702 - DNA, 92 bp, homo sapiens
ggtgctgtgctgctgagggctttcagtagggtctcggggtgatcagaggcttagactcccgctgtgggcggtgctctgctgctgagggcttt

SEQ ID NO: 4703 - DNA, 112 bp, homo sapiens
gggcctccctgatgaggggaagggtggcctctcttcatagcatgacccctagctcggcagcggctgggctgagagaccggagacgggcctccctgatgaggggaagggtggc

SEQ ID NO: 4704 - DNA, 126 bp, homo sapiens
ttttggtttgtggggacagatttttctgtgagcccccccagggcccctcgttttggtttgtggggactgattgtgagccccccagggtttgtttttgtttgtggggacagatttttctgtgagccc

SEQ ID NO: 4705 - DNA, 112 bp, homo sapiens
acacacattcaggagatccagtcagcagtgcagtaggaaccaaggctggtggaagaacaatgtaatctagctttaaacacaaacacacattcaggagatccaatcagcagtg

SEQ ID NO: 4706 - DNA, 82 bp, homo sapiens
catgggggatgagtggaatcaggtttctcgtctcctgggccccctgcagtgtttcctctcatggggaatgagtggaatcagg

SEQ ID NO: 4707 - DNA, 103 bp, homo sapiens
cgctgagcgtgggggacggctcagtaggtacctcggccacagtcctgcccgtccacatgtcctgcagaagcatggcaggcgctgagcgtgtgggacggctcag

SEQ ID NO: 4708 - DNA, 95 bp, homo sapiens
gggtcccagtgcagggtccacaccagagcagaagcggaaggtggcggggagggactgaccgggctgtgggtcccagtgcagagtccacaccagag

SEQ ID NO: 4709 - DNA, 116 bp, homo sapiens
agggagctctgtgatgccgtgagcccgggtgcctgcactctggtcgttggacgtcagcaggctgtgcactggtgaaatcggttttgccagggagctctgtgatgccgatgagcccg

SEQ ID NO: 4710 - DNA, 75 bp, homo sapiens
tcttggcctcatctcttgtgtgacattgggtagtgacgggacctcagcatgtcttggcctcatctcctgtgtgac

SEQ ID NO: 4711 - DNA, 96 bp, homo sapiens
ccactttcctgtttgaaggatgcccgccctcaccaggagctgtgaaggggccaccttctccctctccagactccactttcctgtttggaggatgcc

SEQ ID NO: 4712 - DNA, 90 bp, homo sapiens
tcagcactcttgatatttggggccagacaattgtctctcattggggggatctccgtgcaccttcagcattcttgatatttggggccagac

SEQ ID NO: 4713 - DNA, 90 bp, homo sapiens
acagtatggtgagcctgggtgctctgccagagcaagaccacaggggaagaacacggtcacgctccttacagtatggtgagcctgtgtgct

SEQ ID NO: 4714 - DNA, 106 bp, homo sapiens
tctgtgagggttgggtatgcatgtggccccgctcctgtacacacacatgtgataacagaaggttctggaaggtgaaatctgtgagggttggatatgcatgtggccc

SEQ ID NO: 4715 - DNA, 111 bp, homo sapiens
ttcttgttcaggggttgcagtccttgggtaaataaaataaataaataaataaactttaaacagtatcctcagctcaactcgtttcttgttcaggggttgcagtccttgggt

SEQ ID NO: 4716 - DNA, 97 bp, homo sapiens
gacggccagcccacggaaaggtgcacacgcaggacggcctgtggacagggtcctctctctgtgtcctaagtgcagacggccagccacggaaaggtgc

SEQ ID NO: 4717 - DNA, 107 bp, homo sapiens
gcttgttacaaccgctgcacccacactgacacgtcaccatcctcgcaggctggagtttaccctgggctcgcttctggcgcttgttacaactgctgcacccacactga

SEQ ID NO: 4718 - DNA, 118 bp, homo sapiens
ctgcctcagaagtgaggtgaggggtgcggctaccctgaggtcagaaagggcatttggtgtagaaagttaacagcaggtgttcagaaccctgcctcagaagtgaggtgaggggtgcggc

SEQ ID NO: 4719 - DNA, 118 bp, homo sapiens
gccgcacccctcacctcacttctgaggcagggttctgaacacctgctgttaactttctacaccaaatgccctttctgacctcagggtagccgcacccctcacctcacttctgaggcag

SEQ ID NO: 4720 - DNA, 189 bp, homo sapiens
atgggtgtacgcgtgtacatatatacatacacaaggacatgctagagtctaattacactgattatattaaccatggtgtatgcctctacatatatatacacacacaaggacaaactagaatctagttacaatgattatattaaccatggtgtattcctgtacatagatacaaacacaaggacatgctag

SEQ ID NO: 4721 - DNA, 86 bp, homo sapiens
aattaagttagatctctttcagtgtctccatcataattttgcaaaggcataattttgtaattaagttagatctctttcactgtctc

SEQ ID NO: 4722 - DNA, 86 bp, homo sapiens
ttataaaatatggtgtccttagaaacaagtagttataacaagtagttatgggatgacttataaaatatggtgtccttagaaacaag

SEQ ID NO: 4723 - DNA, 133 bp, homo sapiens
atatatatatatatatatatatataacagaaatatatatatgtatatacaaaatgattacaaattgaaatctatctatctatatatataaacatataaacatatatatgtatatacaaaatgataacaaattg

SEQ ID NO: 4724 - DNA, 93 bp, homo sapiens
aagagccagcgcctttatacaaagcctggaacggagtgtttccgttaaatattaaaagctgtaagagccagcgcctttatacaaagcctggaa

SEQ ID NO: 4725 - DNA, 74 bp, homo sapiens
atgttgcaagttctgtgactctctctgtcttaaatgcttaactggaatacatattgcaagttctgtgactctct

SEQ ID NO: 4726 - DNA, 87 bp, homo sapiens
tagtatgtttaatgttgatgtcatttttattttcaaagccactctgtcatttataatagtatatttaatgttgatgtcatttttatt

SEQ ID NO: 4727 - DNA, 100 bp, homo sapiens
atttaatctttccaatgaagaccctggggataaactttataaaattattcagtagaaggtaggtccttcatgatacatttaaactttccaatgaagaccc

SEQ ID NO: 4728 - DNA, 90 bp, homo sapiens
actcatccttgctggatacttatactttcatcccacacaccacagcctcacacccacacaccatcaactcatccttgctggatacttata

SEQ ID NO: 4729 - DNA, 186 bp, homo sapiens
caccaatcggcattctgtatctagctcaaggtttgtaaacacaccaatcagcaccctgtgtctagctcagggtttgtgagtgcaccaatcgacactctgtatctagctgctctgatggggccttggagaacctttatgtctagctcagggattgtaaatacaccaatcgacactctgtatcttgct

SEQ ID NO: 4730 - DNA, 82 bp, homo sapiens
catgcacacatggtgacacaacacacgcactctcatacagtgacatacccagtcacatgcatacatggtgacatgacacaca

SEQ ID NO: 4731 - DNA, 87 bp, homo sapiens
tcacattcttttagacataatctatttcaagaaaaatagccaaacttttgatagaggaggtcacattattttagacataatctattt

SEQ ID NO: 4732 - DNA, 96 bp, homo sapiens
aaattgtatatatttaaggtgtacagtgtgtgatgctttgatatatgcaagcattgtgaaatggttaccacaaatcgtatatatttaaggtgtaca

SEQ ID NO: 4733 - DNA, 91 bp, homo sapiens
ttgaagagtattggggagcgagtttggcattgtgtggctttagcttcaaattccggagggaatttgaagagtattggggggcgagtttggc

SEQ ID NO: 4734 - DNA, 105 bp, homo sapiens
atacaggattccccactgaccattttctaggtgatgataagggtgaaagttttggaaggtttcatagatattctttgaagatacaggattccccactgagcattt

SEQ ID NO: 4735 - DNA, 144 bp, homo sapiens
agtgggttcttgccccctagaaaagcggtacttgccgctaagggtgaaggagaaggggttgggggcttcttgccccccagaaaagtggagaaggggtagagacacagagagaaggggttggggggttcttgccccccagaaaag

SEQ ID NO: 4736 - DNA, 115 bp, homo sapiens
tatgaagctggtagatttctctgaagtactcaacattccggttaggagagctggggaaaagttagagcttgaagaaccctggtatctatgaagctggtagatgtctctgaagtac

SEQ ID NO: 4737 - DNA, 89 bp, homo sapiens
gcctcctaggctcaagtgattcttatgcctcagcctcccaagtagctgggattcatctcaacctttgcctcctgggctcaagtgattct

SEQ ID NO: 4738 - DNA, 90 bp, homo sapiens
ggaaatggcctctccctggcgtctgcattcagttaacactttagcacaacaggtgtggactgtcaggaaatggcctctccctggctctgg

SEQ ID NO: 4739 - DNA, 110 bp, homo sapiens
aaatatctgtttgtgtgattacaaggtaaccatgatggcagtcaggtatatcacacatatataaatgacacaaacagatataaatatatgtttgtgtgattacaaggtaa

SEQ ID NO: 4740 - DNA, 150 bp, homo sapiens
agaatactgaggcagggtttggaggattactctaagaggatcttttgggccagtggttctttcactccacagcactagctgtatttttataatagattagcatgcagaatactgaggcagggtttggaggattactctaagaggatcttt

SEQ ID NO: 4741 - DNA, 112 bp, homo sapiens
gagggcgcctcccgcgatgcggggagtaatatctccccctctcccccccgggctattaccagccacatcacaggggggtgagggcgccccccgcgatgcggggagtaatatc

SEQ ID NO: 4742 - DNA, 158 bp, homo sapiens
caccaattggcactctgtatctagctcaaggtttgtaaacacactaatcagcaccctgtgtctagctcagggtttatgaatgcaccaattgacactctgtatctagctactagggtggggacttggagaacctttgtttggacactctgtatctagct

SEQ ID NO: 4743 - DNA, 105 bp, homo sapiens
ctgcgatgggggtcctaagagccaggaggtaagatgggaaggctcttaatacccgcatcaaggggcgtgcctcacaccactgcgatgggggtcctgagagccagg

SEQ ID NO: 4744 - DNA, 105 bp, homo sapiens
cctggctctcaggacccccatcgcagtggtgtgaggcacgccccttgatgcgggtattaagagccttcccatcttacctcctggctcttaggacccccatcgcag

SEQ ID NO: 4745 - DNA, 158 bp, homo sapiens
agctagatacagagtgtccacacaaaggttctccaagtccccaccctagtagctagatacagagtgtcaattggtgcattcataaaccctgagctagatacagggtgctgattagtgtgtttacaaaccttgagctagatacagagtgccaattggtg

SEQ ID NO: 4746 - DNA, 158 bp, homo sapiens; identical to SEQ ID NO: 4742

SEQ ID NO: 4747 - DNA, 105 bp, homo sapiens; identical to SEQ ID NO: 4743

SEQ ID NO: 4748 - DNA, 104 bp, homo sapiens
ctggctctcaggacccccatcgcagtggtgtgaggcacgccccttgatgcgggtattaagagccttcccatcttacctcctggctcttaggacccccatcgcag

SEQ ID NO: 4749 - DNA, 158 bp, homo sapiens; identical to SEQ ID NO: 4745

SEQ ID NO: 4750 - DNA, 91 bp, homo sapiens
cttttctgggggagggacaagaacccctcaaccccttctccttcacccttagcagcatgtcccacttttctgggggagggacaggaacccc

SEQ ID NO: 4751 - DNA, 114 bp, homo sapiens
accagccaatcagaacaggccaatcaccagccaatgagaatagaccaggctccagtgaaccataacagtccaggaaccgaagtactgggaaccagccaatgagaatagaccagg

SEQ ID NO: 4752 - DNA, 94 bp, homo sapiens
tttttgtatttttagtagagatggggtttcaccgtgttaggcaggatggtcatccagctaatttttgtatttttagtagagacggggtttcacc

SEQ ID NO: 4753 - DNA, 101 bp, homo sapiens
attgtataattgtacaattaagaaatgtagttcttcagtttagggatagacccaccagcttccacgaaacatccattgtacaattgtacaattaagaaatg

SEQ ID NO: 4754 - DNA, 75 bp, homo sapiens
ttttgtttttatagctaaagtctataaaacttgatgaactgaatttgagtaattttgtttttaaagctaaagtct

SEQ ID NO: 4755 - DNA, 101 bp, homo sapiens
ctgaagagcctagaagctgtgccatcccaatacgcacacattctctctctctcacttttctagttgtatcagctgaagagcgtagaagctgtgccatccca

SEQ ID NO: 4756 - DNA, 100 bp, homo sapiens
ttactataccatctcatttagtgcccacgatttcttaagaggtaggcactgaaggggaaacctgtagctctgtgccttactataccatctcatttagtgc

SEQ ID NO: 4757 - DNA, 101 bp, homo sapiens
ctcacagagccctgccttctgcaggtaccaggtcagactctgcttctgcctcacccgagcccactccccatgtgtctcacagagccctgccttctgcaggt

SEQ ID NO: 4758 - DNA, 116 bp, homo sapiens
agcagcggttctcaaacctcgggtacatccagataacttgggtggggaggaggattgctaaaacacagcaaccgtgccaggtgcacagcagcggttctcaaacctcgggtacatcc

SEQ ID NO: 4759 - DNA, 84 bp, homo sapiens
gagctggggcagaggttagagaaatttaaaaatgcgtatgaataacagcatgtctctacagagctggggcaaaggttagagaaa

SEQ ID NO: 4760 - DNA, 127 bp, homo sapiens
gtaaatcctcactgaaaataacttcagtaaattaaagttcaataaattaatagttcaataaatttctacaatagaatggcaaggagtgcggtggtaaatcctcactgaaaataagttcagtaaatta

SEQ ID NO: 4761 - DNA, 89 bp, homo sapiens
aaacatgagaatgatatctcacaaaaatagagaatatcaacaagagacaattaaaaaaaacatgagaatgatatctcacaaaatagagg

SEQ ID NO: 4762 - DNA, 75 bp, homo sapiens
aatgtcatcagttaaggcaggaacaggacattttcatttattttgcggtggaatgtcatcaattaaggcaggaac

SEQ ID NO: 4763 - DNA, 91 bp, homo sapiens
ggggttcctgtccctcccccagaaaagtgggacatgctgctaagggtgaaggagaaggggttgaggggttcttgtccctcccccagaaaag

SEQ ID NO: 4764 - DNA, 187 bp, homo sapiens
tggcacgatattacttatcgcaattaataatatcacttttaatatcaatattacttatcgcaattaatatcaatttcaatatcaatattacttatcgcaattaataataataatagtaatgcaattaataattaataatctataatatccattttaatatcaatattacttatcgctattaataata

SEQ ID NO: 4765 - DNA, 94 bp, homo sapiens
gtgtacaccctgtgatattatttgtaatatccatggtaaacatgacatctaatagcacagagtgtgtactccctttggtatttctcatactttc

SEQ ID NO: 4766 - DNA, 94 bp, homo sapiens
gtgtacaccttgtgatattatccataatgtcctagaaggatgtcactcctaatatgacagagggcgtacacccagtggtattcttcgtaatatc

SEQ ID NO: 4767 - DNA, 80 bp, homo sapiens
taggcactttgcaagttccttcacatttacaaattacttttcaataattgttaatagacactttgcaagttccttcacat

SEQ ID NO: 4768 - DNA, 123 bp, homo sapiens
agaacttcatggaagaaaaggacctgtaaagagggcgtttctgtacaccgggctgtgttcttctatccagcaattgaaggaattgaatagaacttcatggaagaaaaggacctgtaaagaggg

SEQ ID NO: 4769 - DNA, 84 bp, homo sapiens
gatgttgtgggtttggttccagctctacagctgagaaactcttatattggcctactagggtgatgttgtgggtttggttccaga

SEQ ID NO: 4770 - DNA, 113 bp, homo sapiens
atttcaggaaattcaatgacccattttctgcctatgggacaagaaatttttctcttagaaatcagaattagtcatttcaggaaattcaatgaccccttttctgcctatgggac

SEQ ID NO: 4771 - DNA, 91 bp, homo sapiens
acctttaaagtccagaaggcaagcaggcaaaagatggtttgccaaaagggggatgtatcctggaatatacttttaaagtccagaaggcaag

SEQ ID NO: 4772 - DNA, 108 bp, homo sapiens
tttttttttggaatagtttcagtaaaattgatgtcagctcttctttattatccatcttgaattcatctgaggattccgtcctcctttttttttggaatagtttcagta

SEQ ID NO: 4773 - DNA, 107 bp, homo sapiens
taataacatttaaagttactagattactgtttcaacaaatgtttttaacttatgcttattactgttttaacagtaatttaataacatttaaagttattagattactg

SEQ ID NO: 4774 - DNA, 92 bp, homo sapiens
tctggatactggtgctcctgagtttccaaaatgcaaatagcagaggctgaaaactcagcaagctggtctggatactggtactcctgagtttc

SEQ ID NO: 4775 - DNA, 98 bp, homo sapiens
atgtatttgattttatttaccaaaaatgtaatgtattttattttattgtgtgtctttgatttaatgtaatgtatgtatttgattttatttatcaaaaa

SEQ ID NO: 4776 - DNA, 107 bp, homo sapiens
tatatgcatatgtatatgtttatgtatgtttgcatagaagtagtatatagtgaaatgaatgatttgttatatgtataatatatatgcttatgtatgtttgcatagaa

SEQ ID NO: 4777 - DNA, 62 bp, homo sapiens
tgaaaaaacaggcatctcaggagcggtagtggcaagagatgagaaaacaggcatctcaggag

SEQ ID NO: 4778 - DNA, 96 bp, homo sapiens
ctctctggctagctagaggtttgtaaaatgcgccaatcagtactctgtaaaaacacacaaatcagtgctctgtggctagctagaggtttgtaaaat

SEQ ID NO: 4779 - DNA, 84 bp, homo sapiens
gacaacatgatcttatgttaaaaaaatataaatactgtaccaaaaaactattagaactgacaacatgatcttacgttaaaaaaa

SEQ ID NO: 4780 - DNA, 85 bp, homo sapiens
tgttcacatacacacctgtgtacatatatacatactttaaagtcagtattatgtgtattgttcacatacacacctgtgtacatat

SEQ ID NO: 4781 - DNA, 76 bp, homo sapiens
attatttggtctaaacatgaaattccaggaattaaaaacaagaacttgctagaattatttggtccaaacatgaaat

SEQ ID NO: 4782 - DNA, 101 bp, homo sapiens
atcaaccagcatactgctaggctatgcctgggacatagtagacatttggttgaagccctcacgatgaaatcaaccagcatactgctgggctatgcctggga

SEQ ID NO: 4783 - DNA, 90 bp, homo sapiens
cctagcacctgctgtcaggccatgtcctttcctgcctctggaccccactatctctatctcaggtcctcagcacctgctgtcaggccatgt

SEQ ID NO: 4784 - DNA, 103 bp, homo sapiens
aaaccccgtctctactaaaaatacaaaagttagccgggcgtggttgagggtgcctgtaaccccagctaaaaccccgtctctactaaaaatacaaaaattagcc

SEQ ID NO: 4785 - DNA, 99 bp, homo sapiens
cccattttacagacaaaacaactgagacagcgcttggcacacagtgagcacaatataaatgtttgctatcattcccattttatagacaaaacaactgag

SEQ ID NO: 4786 - DNA, 98 bp, homo sapiens
agaccccatttccttatcagagagaactggcaccttttttagtgggatggcaatgggcaagttactcaactgccgagaccccatttcctcatcagaga

SEQ ID NO: 4787 - DNA, 93 bp, homo sapiens
tgttcagcactcagcagagaggaggccctgaagtgggtggctcctctttgacaacactcatcctgatgactgttcagctctcagcagagagga

SEQ ID NO: 4788 - DNA, 116 bp, homo sapiens
ggaaacagcctctctccagtgaacaaagtgctgggattacaggcgtgagccactgtgtgcctggcccataattcagtttcgactctatggaaacagcctctctccagtgaacaaag

SEQ ID NO: 4789 - DNA, 101 bp, homo sapiens
tccttggttaggtatatttctagatattttctgggtgtgtgcagctattttgggggcattaggttaggttgggtatgttccttggttaggtatattcctag

SEQ ID NO: 4790 - DNA, 105 bp, homo sapiens
cacctcccagacggggtggcggccgggcagaggggctcttcacttcccagacggggcagctgggcagaggcgccccccacctcccagacggggtggcggccgggc

SEQ ID NO: 4791 - DNA, 89 bp, homo sapiens
ttaaacagtgaagctgttccctcctctgccatggttaaaatcttccacaacttcatcagactttttaaacagtgaagctgttccctcct

SEQ ID NO: 4792 - DNA, 73 bp, homo sapiens
ccactaactttaggtcacccagagtcccaccctccaacaaagggacaaaccactaacttcaggtcacccagag

SEQ ID NO: 4793 - DNA, 114 bp, homo sapiens
tcagcctcccaaagtgctgggattataggcatgagctaccgcgcccagccagtcttgatctcttgacctcgtgatccacccacttcagcttcccaaagtgctgggattataggc

SEQ ID NO: 4794 - DNA, 108 bp, homo sapiens; identical to SEQ ID NO: 312

SEQ ID NO: 4795 - DNA, 136 bp, homo sapiens
agacagcaaaaccacataaacacaacaaaatcagccaagtgaataaaaattaatggttaagactgagctgtacataccatcatgggagacagcaaaaccacataaacacaacaaaatcagcctagtgaataaaaat

SEQ ID NO: 4796 - DNA, 74 bp, homo sapiens
agactcagggtgggagtcacaccaggggctcccctcattatcaggccttcagactcagggtgggaatcacacca

SEQ ID NO: 4797 - DNA, 126 bp, homo sapiens
ctttttttttttttttggatatatgggcaaatgctttttgtattttgaacaatttgaattcacaaatgattcagtattatgtttttattttcctttttttttttttttggatatatgggcaaatgc

SEQ ID NO: 4798 - DNA, 80 bp, homo sapiens
cattcttctacaatcctgtttgtccttgacaaaatccctctctcccacctgtacacattcttctacaatcctgtctgtcc

SEQ ID NO: 4799 - DNA, 73 bp, homo sapiens
taattaagagacaaatatatcagttaatagctataattaatagagcagttaattaagagataaatatatcagt

SEQ ID NO: 4800 - DNA, 115 bp, homo sapiens
tttctactccccagaagaagaaaaaaatttctactccccagaagatggagatgttttaaaatggagatctttttaaaattgtattttttctactccccagaagatggagatgttt

SEQ ID NO: 4801 - DNA, 98 bp, homo sapiens
gggaatgcaaattattagtacgacgactatgaaaaacagtatgaaaaactatgaaaaacagactatgaaaaacagggaatgcaaattattagtatgac

SEQ ID NO: 4802 - DNA, 129 bp, homo sapiens
agcaagctctcatatgtctctcttcctccttctcctcctctcatatgtcccttgtcctcctcctcttcctcctcctccccctcctccccctcctccccctcctcctccttcttcttcctcctcctcctc

SEQ ID NO: 4803 - DNA, 101 bp, homo sapiens
gctaatttttgtatttttagtagagacgaagtttcgccatgtagctgggattacaggcgcccgacaccaagctaggctaatttttgtattttcagtagaga

SEQ ID NO: 4804 - DNA, 87 bp, homo sapiens
atcccatctatgcaggagaatccctgtcccggagcaagcaggaggctgatgggaacagagtatcccatctatgcaagagaatccctg

SEQ ID NO: 4805 - DNA, 93 bp, homo sapiens
agtctatgtaagaaaatgattgaataaatcattttcataagtcatttcttacataagacaataagtcttatgtaagaaaatgattgaataaat

SEQ ID NO: 4806 - DNA, 75 bp, homo sapiens
tatttcctcaaagctttatagctttgcattattattgtatagctctgtagtattttctcaaagctttatagcttt

SEQ ID NO: 4807 - DNA, 128 bp, homo sapiens
tgattatgtgtttattattttctcctcttgtagcctattggtttagaagttatatattaggtttctattattttaatggaaaaataggttaaaaataaaacctaataataggtttctattattttaat

SEQ ID NO: 4808 - DNA, 103 bp, homo sapiens
tctctactaaaaatacaaaaattaaccaggcatggtgaccagcctggtcaacatggtaaaaccctctctctactaaaaatacaaaaattaaccaggcatggtg

SEQ ID NO: 4809 - DNA, 95 bp, homo sapiens
caagaggattgtaaaatgcaccaatcagcattctgtaaaaacacaccaatgagcactctgtagctagcaagaggattgtaaaatgcaccaatcag

SEQ ID NO: 4810 - DNA, 169 bp, homo sapiens
atgcatatttttctgtattaaatttttctgtattaaatatatatatatatatatatatgaatgcatatttttctgtattaaattacagctggtctcaatcttttttggtctcaaaatcctggcctcaagcaatcctcctgcctctacagctggtctcaatctcttttgg

SEQ ID NO: 4811 - DNA, 108 bp, homo sapiens
tcaaagaaagagacagagaggaagagacaaagaagaagtcagagaaaaagagggacagacacagtcaaagagagagttaaaaagagaggaagagacaaagaagaagtc

SEQ ID NO: 4812 - DNA, 113 bp, homo sapiens
gaataaagaagagtataatgtatgctgtcaaatttctgttggtcaaatttgatgcatcgttataagatccctggaatgccttctagaataaagaagagtataatgtgtgctgt

SEQ ID NO: 4813 - DNA, 90 bp, homo sapiens
gcggtgtgggcggggccaagggcctggggaggcacggctggaggcgggttggaggcgtggcgccgcggtgtgggcggggccgagggcctg

SEQ ID NO: 4814 - DNA, 90 bp, homo sapiens
catgcccaactaatttttgtatttttaacctcctgagtagctgggattacagatgtccaccatcatgcccagctaatttttgtattttta

SEQ ID NO: 4815 - DNA, 87 bp, homo sapiens
tgtctactacagcctagacaagacttcaacgatttgactaccgaatgtatgaaataccatcattgtctactacaccctagacaagac

SEQ ID NO: 4816 - DNA, 114 bp, homo sapiens
ttctctggtcaatggtatccccatccttggggacccaccattaaatttctttttttttttttcccctccctccctcccttccttttctctggtcaatggtatccccatccttgg

SEQ ID NO: 4817 - DNA, 62 bp, homo sapiens
gaatagggtagtattactcactcttgaagtggtactcttgaatcgggtagtattactcttga

SEQ ID NO: 4818 - DNA, 77 bp, homo sapiens
tttctgtcttctgagccctccaagtctctaggaagttccaaactttcccacattttcctgtcttctgagccctccaa

SEQ ID NO: 4819 - DNA, 167 bp, homo sapiens
catatatattacatatataaatattgatatattacatatcaatatataaacctaggatataaacccaatatgtaattgatatgttacatatcaatatatattatacatgtattgatgtcttacatatcaatattatacatgtgttgatatattacatatcaatatat

SEQ ID NO: 4820 - DNA, 102 bp, homo sapiens
caagataatttttcttctattagagtttctcttttagggtttctattagagtttctctaatagggggtagagaaacagcaagataattttttttctattaga

SEQ ID NO: 4821 - DNA, 150 bp, homo sapiens
tacaactgagttgaattttcagaaaatacaactgagaaaaagcagaagccataaaatgactaacataatattaatttagacattaatgtttattttcagaaaatacaactgagttgaattttcagaaaatacaactgagaaaaagtagaa

SEQ ID NO: 4822 - DNA, 128 bp, homo sapiens
caagcttcagagctcagaaccacacacacacacacacacacacacacacaaacaacttctagtggccacttctcaagctataatactcactacacaagcttcagagctcagaaccacacaaacacaca

SEQ ID NO: 4823 - DNA, 100 bp, homo sapiens
tgagcaacacggaataaaatggaaccatcatcagcacagaactgacatcctccctattccagatgggctctgagcaacacagaataaaatggaaccatca

SEQ ID NO: 4824 - DNA, 86 bp, homo sapiens
tcatttaattgaacaaatatttgttatttgttcaatacagtattcagtattacatatagttcatttaattgaacaaatatttgtta

SEQ ID NO: 4825 - DNA, 110 bp, homo sapiens
ccctgagctagacacaaagagtctcctcctccccaacagattagctagatacagagtgtccacacaaaggttctccaaggccccactagagtagctagatacagagtgtc

SEQ ID NO: 4826 - DNA, 103 bp, homo sapiens
cgggatataatctcctgatgtgccgtttgttataatctcctggtgtgccgggatataatctcctgatgtgccgggatataatctcctgttgtgccgtttgtta

SEQ ID NO: 4827 - DNA, 102 bp, homo sapiens
tcacccaaatactgaacattgtacctaagcttgtatgttacatgggtatattgcatcatgatgtagattggattcccatcacccaaatattgaacattgtac

SEQ ID NO: 4828 - DNA, 102 bp, homo sapiens
tacttaaagatcaattcaaaataagttacgtttactctggtcttctgcttgagaaactttgggttgatggttctacatttacttcaagatcaattcaaaata

SEQ ID NO: 4829 - DNA, 101 bp, homo sapiens
aaagacagcaagaatgaaaaatggaacaaaggaaattatttattcaaaaaattatcataccacaaagaaagacagcaagaatggaaaaatggaacaaagga

SEQ ID NO: 4830 - DNA, 114 bp, homo sapiens
agaatgcattggtaagggccactaaatccgatttttcttgttcctctttgtggtctaagaggaaaggcaagagtgcaggtttttgagaatgcattggtaagggccactaaatcc

SEQ ID NO: 4831 - DNA, 100 bp, homo sapiens
aatttccataaaatttatagaatcattctctctctctccctctctctctccctctattgtagaaaaattcccataaaatttatagaatcattctctctct

SEQ ID NO: 4832 - DNA, 146 bp, homo sapiens
ggggcagcccctgagatatgcctagaacagccataatcacatgcttttgtactattttttaatatttttattttgtattattttttaatatctcaggggcagcccctgagatatgcctagaacagccataatcacattcttttgta

SEQ ID NO: 4833 - DNA, 83 bp, homo sapiens
attttctaatattattttcaagacatttctattatattttgtagtatgtctattattattttctaatattattttctagacat

SEQ ID NO: 4834 - DNA, 112 bp, homo sapiens
accctctctccccaccccaacacgtgcatgcacgcatgcacacacacatgcacacaccctctctccgcatgcacacaccctctctccccaccccaacatgtgcatgcacgca

SEQ ID NO: 4835 - DNA, 98 bp, homo sapiens
ccctgacctcctcctccatctgggctgaggggtggcagggccaagagtcccctcagcccccaaccctgaccccctcctccatctgggctgaggggtgg

SEQ ID NO: 4836 - DNA, 95 bp, homo sapiens
gttgtgtgactagagcagggcttgatgtttccttaagcttcagccttgcgtagactagtcagcttccagttgtgtgactagagcagagcttgatg

SEQ ID NO: 4837 - DNA, 93 bp, homo sapiens
ctatctacctatatcattacaaaattcttgacttgactcctatatcattacaaagtcatggccctatatcattgactcctatatcattgtaaa

SEQ ID NO: 4838 - DNA, 120 bp, homo sapiens
taatacttttataatttcttatgcctgtctttactgcaatctctgaacataaattgtgaagatttcatggacatttatcagttcccaaataatactcttataatttcttatgcctgtctt

SEQ ID NO: 4839 - DNA, 156 bp, homo sapiens
aataacctttctaccccctttctcttcctctactccctttgaaggtcaatgactcttacatttgctatctcactgatccaataactgttctttgttcttttaaataacttttctaccccctttctcttcctctactccctttgaaggtcaatgact

SEQ ID NO: 4840 - DNA, 122 bp, homo sapiens
gtatattttcatatatataaaatgtggaatgttttatatagtataaaatgtggaatattgtttatatatattttattatatatataagcagaatgttttatatagtataaaatgtggaatat

SEQ ID NO: 4841 - DNA, 124 bp, homo sapiens
gggctaagcatgtaagtatgattttgtggtggcaggtagctggttgttatatagatttgattagatatttgcttaatagtgttggggggctacgcatgtaagtatgattttgtggtggcaggta

SEQ ID NO: 4842 - DNA, 188 bp, homo sapiens
aaagttattaatttcataaaaaattttcaaagcatctgctttttgtttcgttggttttctcagtctagctaaaaatttattaatttcataaaaaatttattaatttcataaaaaatttttaaagactccactctttgttataatggttttctttattattttccagcttttaatttcatatagaacta

SEQ ID NO: 4843 - DNA, 107 bp, homo sapiens
tctttttgcatgtggacatccaattgttctatcttgcacacttgtgcaaggtgtgatgtctgtattgagattcgtctttttgcatgtggacatccaattgttctatc

SEQ ID NO: 4844 - DNA, 118 bp, homo sapiens
atcagtggaggactggataaagaacacattatatatatatgcacacacatatatatttatcatgtaatatatattgatatcatatatatatcaatggaggactggataaagaacacat

SEQ ID NO: 4845 - DNA, 100 bp, homo sapiens
tgtgtgtgttgaaaaggtgggcagaaaaaaaaaagaaaagaaaactacacagatgcatgagagaatgccaggagctgtgtgtgttgaaaaggtggtcaga

SEQ ID NO: 4846 - DNA, 89 bp, homo sapiens
ataagggtctaacaaagatcacatgcttctgagggaacaggacaaagagcaaaagcagaaccactgataagggtccaacaaagatcaca

SEQ ID NO: 4847 - DNA, 77 bp, homo sapiens
actaatttttgtatttttagtagctgagattataggctcgtgtcaccacgcctggctaatttttgtatttttagtag

SEQ ID NO: 4848 - DNA, 77 bp, homo sapiens; identical to SEQ ID NO: 4847

SEQ ID NO: 4849 - DNA, 96 bp, homo sapiens
cattttacaaacctctagctagctacagaacactgattgatgcgtttttacagagcactgattggtgcattttacaaacctctagctagctacaga

SEQ ID NO: 4850 - DNA, 66 bp, homo sapiens
ctatgtattgtaatacatagtattacattgtataagtgtataaatacatagtattacattatataa

SEQ ID NO: 4851 - DNA, 78 bp, homo sapiens
atgtagttacaggttcaggattacttgaaatacttcggtacatgcagttattaaatgtagttacaggttcaggattac

SEQ ID NO: 4852 - DNA, 84 bp, homo sapiens
gttttcactagaaactaagcaatcattaagaaattaagcaatcattaagaaatttctagttttcactagaaattaagcaatcat

SEQ ID NO: 4853 - DNA, 80 bp, homo sapiens
ctattctataatgaccatgagtaacgcattttactatcagccaacaactccagcacctattccataatgaccatgagtaa

SEQ ID NO: 4854 - DNA, 136 bp, homo sapiens
ggacacagcacaaggaaacagtctttcatgtaagaaaaaagactgttatttaggctgggcgaggtggttcatgcctccaatcccagcagtttggacacagcacaaggaaacagtctttcatgtaagaaaaaagact

SEQ ID NO: 4855 - DNA, 158 bp, homo sapiens
caccaatcggcactctgtatctagctcaaggtttgtaaacacagcagtcagctccctgtgtctagctcagggtttgtgaatgcaccaatcgacactctgtatctagctactctggtggggacttggagaacctttgtgtccacactctgtatctagct

SEQ ID NO: 4856 - DNA, 83 bp, homo sapiens
gggtaagtggaggaatactttttttttttttagtgtgtgtgaacattccacccatgggtaagtggaggaatactttttttttt

SEQ ID NO: 4857 - DNA, 153 bp, homo sapiens
tttgttctgttactgttaggtttgttttctaacaccctgtttaagaactatttatcccagggggaataaagttacttatcaaatttgttctgttacttatcaaatttgttctgttactgttaggtttgttttctaacatcctgtttaagaact

SEQ ID NO: 4858 - DNA, 122 bp, homo sapiens
gaacataaattgtgaatatttcatggacattgattagttcctcaaattaatacttttataatttcttacacctgtctttactgcaatctctgaacataaattgtgaagatttcatggacatt

SEQ ID NO: 4859 - DNA, 109 bp, homo sapiens
tctatgacaaacccacagccaatatcatactcaataaattaggtagtgatgggacgtatttcaaaataataagagctgtctatgacaaacccacagccgatatcatact

SEQ ID NO: 4860 - DNA, 107 bp, homo sapiens
ttattttgattcagcaggttggaaaaatttttgtagtgaaacttctttgtgatgagtggattcacctcatcgagttaaaccttacttttgattcagcaggttggaaa

SEQ ID NO: 4861 - DNA, 81 bp, homo sapiens
tcacctgggtactgggaagaaagaggcctccctgggccagagtccagggctttagccgtcacctgggttctgggaagaaag

SEQ ID NO: 4862 - DNA, 108 bp, homo sapiens
caccaattggcactctgtatctagctcaaggtttgcaaacacaccaatcagcaccttgtgtctagctcagggtttgcgaatgcacgaatcgacactctgtatctagct

SEQ ID NO: 4863 - DNA, 84 bp, homo sapiens
aactgctttgcaatgtgtggattcatctcacagagttaagccaaaaaaaaaaatctctgtgaactgcattgcaatgtgtggatt

SEQ ID NO: 4864 - DNA, 75 bp, homo sapiens; identical to SEQ ID NO: 1938

SEQ ID NO: 4865 - DNA, 101 bp, homo sapiens
cagctcaccacaacctccacctcccaggttgaagcaattctcctgcctcagcctcccaagtagcaatggcgcaatcccagctcaccacaacctccgcctcc

SEQ ID NO: 4866 - DNA, 146 bp, homo sapiens
ccatgattgtgctactgcactccagcctgggcaacagagtgagaccctctccttttttttttttttttttttttttaaaggaggtagaagcttcagtgatccatgatcgtgctactgcactccagcctgggcaacagagtgagacc

SEQ ID NO: 4867 - DNA, 81 bp, homo sapiens
tcgcccaggctggagtgcagtggcgtgactgagacggagtcttggagtctcgctttgtcgcccaggctggagtgcagttgg

SEQ ID NO: 4868 - DNA, 97 bp, homo sapiens
cagggtggctcctgaggtcagatgtctctgttacactgacccctgacccccatctatggtcactcctcagggtggctcctcaggtcagatgtctctg

SEQ ID NO: 4869 - DNA, 122 bp, homo sapiens
gaacgtaaattgtgaagatttcatggacatttatcagttcccaaaattaatacttttataatttcttacacctctctttactgcagtctctgaacataaattgtgaagatttcatggacatt

SEQ ID NO: 4870 - DNA, 109 bp, homo sapiens
tcaataaacagagttcagaacaatctcacctgtcacccacagggtgaaagagagctgtcaggggaccagtgacttcagacgtcatcaataaatagagttcagaacaatc

SEQ ID NO: 4871 - DNA, 83 bp, homo sapiens
ctggcaaataaacatgctctgtatcctctccttcctttgccactttagctttatctggcaaataaacatgctctgtaacctct

SEQ ID NO: 4872 - DNA, 102 bp, homo sapiens
acttctgtgtaccccatggtaaaaatgactccatccaaaaaaaaaaaaaaaaaaaaaacatgactgggtatcttacttctgtgtactccatggtaaaaatga

SEQ ID NO: 4873 - DNA, 107 bp, homo sapiens
tgatgtctattgacagtagtaatattggtatgtgtgtatatatatatatggtacttttcttagatttatgttacaaaaagttgatatctattgacagtagtaatatt

SEQ ID NO: 4874 - DNA, 82 bp, homo sapiens
ggaaagtttggaactttctagagacttggagggctcagaagacaggaagatgtgggaaagtttggaacttcctagagacttg

SEQ ID NO: 4875 - DNA, 64 bp, homo sapiens
tgattgtaaatgcaccaatcagcactctgtttctagctaaaggtttgtaaatgcaccaatcagc

SEQ ID NO: 4876 - DNA, 71 bp, homo sapiens
ctctgtaaaatggaccaatcagctttctgtaaaatggaccaatcagctccctgtaaaatggaccaatcagc

SEQ ID NO: 4877 - DNA, 96 bp, homo sapiens
acttattctagatatggctatgccttccaggttgattacattgggtaactttctgcagtgaaataggcacttactctagatatggctatgccttcc

SEQ ID NO: 4878 - DNA, 138 bp, homo sapiens
gagcttggaatgtttctgtgttgggaagaagtttatggtggggttggaatgtctctggttggaggggacattatcttggggctgacatctctctggctggaggaaaggttatctgggggttggcatgtctctggttgg

SEQ ID NO: 4879 - DNA, 280 bp, homo sapiens
attttacagagagccgattggtctgttttacagagagctgattggtccattttgacagggtgctgattggtgcatttacaatccctgagctagacacagaagttctccacctccccactagattaactagatacagagtgtccacacaaaagttttctgtgtccccatgagtagttagatacagagtgtcgattggtgcattcacaaaccctgagctagacacagggtgctgattggtgtgtttacaaaccttgacctagatacagagtgccgattggtg

SEQ ID NO: 4880 - DNA, 77 bp, homo sapiens
atttagtatgtctaaaatataagggaacctcaacttcttttttaaaaaaaacatttaatatgtctaaaatataaggg

SEQ ID NO: 4881 - DNA, 146 bp, homo sapiens
tgtttctggatttgtgtttctggagtgaagtggaaattccccaaggagtatcttctttaactgtgttaccaaatcacagatgccccactctcactgaatttgtttctggatttgtgtttctggagtcaagtggaaattccccaagg

SEQ ID NO: 4882 - DNA, 78 bp, homo sapiens
tggcaaagctaattctgagagtttctgcttgattttttgtgttgtttttgtgttttggcaaagcaaattctgagagtt

SEQ ID NO: 4883 - DNA, 75 bp, homo sapiens
tggattcaagctattctcctgccgatcttcactcactgcaacctctgcctcttggattcaagctattctcctgcc

SEQ ID NO: 4884 - DNA, 88 bp, homo sapiens
tatattaatacaggatctttcttggaggtcacactaatatctgagtagtgattgttttctatattaacacaggatctttcttggaggt

SEQ ID NO: 4885 - DNA, 81 bp, homo sapiens
accccgtcagcagttaacacagcgctgcacttaagctgttttttcttttcttgtctctaccctgtcagcagttaacacagc

SEQ ID NO: 4886 - DNA, 102 bp, homo sapiens
agaaatcctccataatagttccatcacttccatcagctgcctgttgaactgcttttcacctctacactgagcaagaaatcctccttaatagttccatcactt

SEQ ID NO: 4887 - DNA, 81 bp, homo sapiens
aaatgtcagtacaaataagtctgccttattctttttactttcttggaaatgtaaaatgtcagtacagataagtctgcctta

SEQ ID NO: 4888 - DNA, 176 bp, homo sapiens
ctttctacatctgttgaatctcaaatgccttcagtttaaaacaatcttcataccaactctgggggctgagtgggtccccacagtagcatgtctttctacagctgaaaaacattacatgtttttctacagcatgtctttctacagttgctgctttctacagttgaaaaacattacat

SEQ ID NO: 4889 - DNA, 112 bp, homo sapiens
tcctcccagaccacaaggaggaccaaggaaggtcggatttagtggcccttaccaatgcattcttgaaaacatgcacccttgcctgtcctcctagaccacaaggaggaccaag

SEQ ID NO: 4890 - DNA, 74 bp, homo sapiens
tcttttctcctctaagatagaaaagatcttagaggagatagaaaagatagtcttttctcctctaagaagaaaat

SEQ ID NO: 4891 - DNA, 167 bp, homo sapiens
cacccacatcctgctgattggtccattttacagggtgctgattggtccattttatagaatgctgattggtccatttttacagagtgctgattggtgtgtttacaaacctttagctagacacagagtgctgattggtgtgtttttacagagtgctgattggttcattt

SEQ ID NO: 4892 - DNA, 103 bp, homo sapiens
gaatagttgcactcaccaatgcagcaacagaaacacctcttgcccaagaacctgcaacggtccctggaccctgctgatcagaatagttgcactcaccgatgca

SEQ ID NO: 4893 - DNA, 89 bp, homo sapiens
tgtctagctaaaggattgtaaacgcaccaatcagcactctgtaaaaatgcaccaatcagtgctctgtgtctagctaaaggtttgtaaac

SEQ ID NO: 4894 - DNA, 90 bp, homo sapiens
aatcagaatcaaaaccaaaaccaaagtgccgataaatgcatacctgttcatcaagcaattcaagccaagtcaaaatcaaaaccaaaacca

SEQ ID NO: 4895 - DNA, 142 bp, homo sapiens
ggttcatggtctcgctagctcaggagtgaagctgcagaccttcgcggtgagtgttacggctcttaaggcggcgcatgtggagttgttcgttcctcccggtaggttcatggtctcgctggctcaggagtgaagctgcagacct

SEQ ID NO: 4896 - DNA, 82 bp, homo sapiens
atttattttttgagacgaagtctcactatttatttatttatttatttatttatttatttattttttgagacgaagtctcact

SEQ ID NO: 4897 - DNA, 68 bp, homo sapiens
caccaatcagcactctgtgtctagctcaaggtttgttaaacacaccaatcagcaccctgtgtctagct

SEQ ID NO: 4898 - DNA, 99 bp, homo sapiens
agtagcatttttttttttttttgagatggagtctcactctgtcgctcaggctggagtgcagtggcgcgattgtagtagcactttttttttttttttgag

SEQ ID NO: 4899 - DNA, 74 bp, homo sapiens
caggttggaaaatgaatgaatgaatgaatgaatgaatgaaggaaagttatgggttggaaaacgagtgaatgaat

SEQ ID NO: 4900 - DNA, 253 bp, homo sapiens
aaaatgccctaatcagcactctgtagctaggattgtaaaacgcaccaatcagtgctctgtagctagcaaggggattgtaaaatgcaccaattagtgctctgtagctagcaaggggattgtaaaatgcaccaattagtgctctataaaaacgcaccaatcagtgctctgtacctaacaagaggattgtaaaatgcaccaatcagtgccctgcacaactcaccaatcagtaaaacgcaccaatcagtggtctgta

SEQ ID NO: 4901 - DNA, 97 bp, homo sapiens
ttcatgcatgttgtagcatgtgacaggatttatttccttcgcgagactgagtagtattccattgtattgttcatgcatgttgtagcatgtgagagga

SEQ ID NO: 4902 - DNA, 149 bp, homo sapiens
ctagcatctgattctttcttcatggactggaagagcaaacccattgatcattaatccaatcctgctcacataatattacgggttatagcatttagctcttcctagcatctgattctttcttcatggactggaaaagcaaacccattgat

SEQ ID NO: 4903 - DNA, 76 bp, homo sapiens
tgatttctccagaattatgtagtgaatgtagtgaatgtagtgaatgtagtgaattctccagaattatgtagtgatt

SEQ ID NO: 4904 - DNA, 91 bp, homo sapiens
ggtctcctctctgctgagggctgcacattggtcaggaccctccctgtgggtaggagctacccactctgggtctcctctctgctgagagctg

SEQ ID NO: 4905 - DNA, 160 bp, homo sapiens
aacagggttgggtggcgtccatatccaagtagggcaccaacaagggttgggggcagtgtcttcacttggccaaataacagtgagggcacgatggagaacacagccaacagggttgggtggggtccatatccaagtagggcaccaacaagggttgggggca

SEQ ID NO: 4906 - DNA, 96 bp, homo sapiens
caatcctcctgcctcagcctcctgactagctgggactataggtgtataccagcctcaaactcctgggctcaaccaatcctcctgcctcagactcct

SEQ ID NO: 4907 - DNA, 156 bp, homo sapiens
cttcaggaaacctccataccgtttctggtagtccatccaccactctgggcgacctactcttctcatgaagcccccatatcgcttctgcagctctttggcttcatcttccagttgggggcttctctttaagcctctcatgaagcccccatatctctt

SEQ ID NO: 4908 - DNA, 100 bp, homo sapiens
ccaggacttcctttgaatgcagaaagaagcaaatggtttgcattgactctccccaaaggccagtctctgtttgaaccaggacttccttcgaatgcagaaa

SEQ ID NO: 4909 - DNA, 123 bp, homo sapiens
gaacataaattgtgaagatttcatggacatttgttagttccccaaattaatacttttataatttcttacgcctgtctttactgcaatctctgaacataaattgtgaagatttcatggacattt

SEQ ID NO: 4910 - DNA, 99 bp, homo sapiens
gggtgttcactgtaaaattttttgacttttgtatgtttctgaaatataaattgtagaatctaggtagtgtgtatccgggtgttcactgtaaattttttt

SEQ ID NO: 4911 - DNA, 85 bp, homo sapiens
ggcattattacagttctggggacaacatatgtgcctaataagaaatggtcattactaatggggcattattacagttctggggaca

SEQ ID NO: 4912 - DNA, 122 bp, homo sapiens
atttgtatttgaaaaagaaagaatgggtaaacacattttttttttaaaaagaaacacacattttatttgaaaaagaaataaaacacacattttatttgaaaaagaaagaatgggtaaacaca

SEQ ID NO: 4913 - DNA, 73 bp, homo sapiens
aaaggggagagaagagtggcaaggactcttcccactcaaggactcaaattaaaggggagagaagagtgggaag

SEQ ID NO: 4914 - DNA, 97 bp, homo sapiens
ttagtataagtatataccaaatattgcatatactattgcatttacttatactaaaaaaattttagtataagtacataccaaatattgcatatactat

SEQ ID NO: 4915 - DNA, 141 bp, homo sapiens
tcatatgttgaaaaaaaattgtaggggaggtataattttttctctatagccagactgacttgttcttcttgagaatttagttagtgcaacccaattcatatgttgaaaagaaattgtaggggaggtataattttttctcta

SEQ ID NO: 4916 - DNA, 130 bp, homo sapiens
ctctgtgtctagctaatctagtggggacttggagaactctcctttctagcactctgtgtctagctacaggattgtaaacacaccaatcagcactctgcgtctagctaatctagtggggacttggagaact

SEQ ID NO: 4917 - DNA, 73 bp, homo sapiens
gaataaaacacctaggaatacaactaatctgggacaaaatacctaggaataaaatacctaggaataaaatacc

SEQ ID NO: 4918 - DNA, 125 bp, homo sapiens
ataagtgtccatgaaatcttcacaatttatgttcagagactgcagtaaagacaggcataagaaattataaaagtattaatttgggaaactaataaatgtccatgaaatcttcacaatttatgttc

SEQ ID NO: 4919 - DNA, 94 bp, homo sapiens
agttcttcatttttatcttagccctaggactaagttttcatttttatcttattttattttatctagttttcatttttatcttagccctaggact

SEQ ID NO: 4920 - DNA, 108 bp, homo sapiens
aaaatgcttcatttcagtgacaccctgagctgggagggagtaaagactcataggcaaaagggactaatacatgtatataaaatgcttcatttcagtgataccctgagc

SEQ ID NO: 4921 - DNA, 71 bp, homo sapiens
aagaagcctcaaaggaaaatttacttctaaatgatttatagatcaaaaaagaagcctcaaaggaaaattta

SEQ ID NO: 4922 - DNA, 85 bp, homo sapiens
attaatgcaattcacctgtttgcaatcataattgaggataatataatttttatacttagtattaatgcaatttacctgtttgcaa

SEQ ID NO: 4923 - DNA, 124 bp, homo sapiens
caggaaaaggcacctaatgctgggaggagaaattaatcggtgatcagcagtgtcaatactgcagaaagtcacatgagcatgagattcaggaaaaggcacctaatgctgggaggagaaattaatc

SEQ ID NO: 4924 - DNA, 90 bp, homo sapiens
tctgcaagcaggggaaagaaagaattttctgacacaattacaaaaacaaagtaccacgttaggctgtctgcaagcaggggaaagagagaa

SEQ ID NO: 4925 - DNA, 73 bp, homo sapiens
aacctaccaactacttcccaccataattaagacggtaggccccagtatcaaccctaccaactacttcccacca

SEQ ID NO: 4926 - DNA, 133 bp, homo sapiens
tctatatatatgtatgtatctcccttcctccctcctcttctacctcctcctcctctctctctctctctgtctctctctctctccatatatatatatgtatatatgtatgtatatcccttcctccctcctcttc

SEQ ID NO: 4927 - DNA, 95 bp, homo sapiens
ccagcctgggtgtcagagcaaggcaagaccctatctcaaaccaacaaacaaacaaacagcctgcgcccagcctgggtgtcagagcaaggcaagac

SEQ ID NO: 4928 - DNA, 74 bp, homo sapiens
cttgagaggctgaggcatgagaatcacttgattcttggagaatcacagctgcttgggaggctgaggcatgagaa

SEQ ID NO: 4929 - DNA, 124 bp, homo sapiens
taatacttttataatttcttatgcctgtctttactgcaatctctgaacgtaaattgtgaagatttcatggacatttatgagctcccaaataatactcttataatttcttatgcctgtctttact

SEQ ID NO: 4930 - DNA, 94 bp, homo sapiens
ctggggttgtgtttcttatagatgaatatggtgaatgaggtgctagaataactgtagattctggggttgtgtttcttataggtgaatatggtga

SEQ ID NO: 4931 - DNA, 134 bp, homo sapiens
aactatattcaatttatgtaaatgcctcccccccatgtatatataaaataagtgcagaaatgaggatatgaaagtagtaagttacagaataataactatattcaatttatgtaaatgcctccccctccatgtat

SEQ ID NO: 4932 - DNA, 98 bp, homo sapiens
atgctcatggatagaaagaatcaatatcatgaaaatggccataccacccaaaacaaatggaaaaacattccatgctcatggataggaagaatcaatat

SEQ ID NO: 4933 - DNA, 139 bp, homo sapiens
ccattcacaaccaggagagagggatcctttcacaaccagcagggagaagcccattcatagccagaggggtccattcacaaccaggagggaggggcacttcatcaggagggaggggcccatttataacaaggagggaaag

SEQ ID NO: 4934 - DNA, 100 bp, homo sapiens
taatcccagcacttttgggaggccaaggaggacagatcacctgaggtcaggagatcgagaccagcctgaccaacatgtaatcccagcacttttgggaggc

SEQ ID NO: 4935 - DNA, 156 bp, homo sapiens
tatttcttcagaatttcttcagaattctgacacactgaggtactgagaagcaactcagtatttcttcagtatttcttcagaattctgaagaatacaacttcagtatttcttcagaattctgaagaatacaacttcagtatttcttcagaatttggt

SEQ ID NO: 4936 - DNA, 78 bp, homo sapiens
atttatttaattaaatatatttctacgtcttatatgatgtctctgaagaggtatttatttaattaaatatatttctac

SEQ ID NO: 4937 - DNA, 95 bp, homo sapiens
cgtaaaagctgccatgtagagagatactacttaaaagctgccatgtagagatactacttaaaagagatactacttaaaagctgccatgtagagag

SEQ ID NO: 4938 - DNA, 101 bp, homo sapiens
tgcactccagcctgggcgacagagtaagattctgtctcaaaaaaaaaaaaaaaaaaaatccacttgtattgctccagtgcactccagcctgggtgacagag

SEQ ID NO: 4939 - DNA, 89 bp, homo sapiens
ttattttaaatacagccatatattattacatacagccacacattattaaataatgtattaatacattattattaaatacagccatatat

SEQ ID NO: 4940 - DNA, 125 bp, homo sapiens
ataaatgtccatgaaatcttcacagtttatgttcagagattgcagtaaagacaggcataagaaattataaaagtattaatttggggaactaataaatgtccatgaaatcttcacaatttatgttc

SEQ ID NO: 4941 - DNA, 98 bp, homo sapiens
tcacattacccaactacaaactaagagtcagaacggacagagcaatcctaagcacaaaaaacgaagccaaaggcatcacattacccaacttcaaacta

SEQ ID NO: 4942 - DNA, 83 bp, homo sapiens
gtcactgctttatcaactaagttgatgcaatattttaagttgatgcagtattttaagtcactgctttatcaactaagctgatg

SEQ ID NO: 4943 - DNA, 89 bp, homo sapiens
ataagggtctaacaaagatcacatacttctgagggaacaggacaaagggaaaaagcaaaaccactgataagggtccaacaaagatcaca

SEQ ID NO: 4944 - DNA, 172 bp, homo sapiens
ggtccgtttacaatcctttacctagccgcaaaagttctccaagtccccagtagattagctagacacagagcactgattggtgcatttacaaaccttgagctagacacagttacgtttacaaaccttgagctagacacagagtgctgatcggtgcatttacaaatcttgagct

SEQ ID NO: 4945 - DNA, 94 bp, homo sapiens
aagtgctcaacaatgtaacatatgctgtgtgtagtatccactcacaaattgcaaaacaaaatggaagtactcaacaatgtaacatatgctgtgt

SEQ ID NO: 4946 - DNA, 124 bp, homo sapiens
gttgttacttctctcttctcacctaaggctcaggtcctcctctatgtttcttaaatgttacatgtgaatcccactttctcacttgcatggatgttgttacttctctcttctcacctaaggctca

SEQ ID NO: 4947 - DNA, 99 bp, homo sapiens
taatcccaggactttgggaggctgaggtggccggatcacgaggtcaagagatcaagtggtggctcatgcctgtaatcccagcactttgggaggctgagg

SEQ ID NO: 4948 - DNA, 100 bp, homo sapiens
taccaaagccagacaagcacattacaagagggaatatttcaaaactatttttatgaggccagaattactttggtaccaaagccagacaaagcacattaca

SEQ ID NO: 4949 - DNA, 78 bp, homo sapiens
tacatctaccatatactcataaaagctaaaactaaacatctatacatctacctatacatctaccatgtactcataaaa

SEQ ID NO: 4950 - DNA, 156 bp, homo sapiens
cagctgcaggtctgttggagtttgctggaggtccactccagaccctgttttcctgggaggtccactccagaccctgttcaccagcagaggctgcagaacagctgcaacagctgcaggtctgttggagtttgctggaggtccactccagaccctgtt

SEQ ID NO: 4951 - DNA, 91 bp, homo sapiens
taaacccagatgagatactatacttgagatggtatactaagtttcctagtttgatatgtactcttctaaacccagatgagatactatactt

SEQ ID NO: 4952 - DNA, 114 bp, homo sapiens
tttttgagacagggtctcactctgtcacccacgctggagtgcagcggcactttattttttatttttatataaattttttgagacagggtctcactctgtcacccatgctggagt

SEQ ID NO: 4953 - DNA, 108 bp, homo sapiens
gtaagggccactaaatctgacctttctcagtcctcttgtggtctaagaggaaaggcaagtgtacaggttttcaagaatgtgtcggtaagggccactaaatctgacctt

SEQ ID NO: 4954 - DNA, 138 bp, homo sapiens
cccaaataatacttttataatttcttatgcctgtctttatttcaatctctgaacataaattgtgaagatttcattttaatatggacatttctcagttccccaaattaatacttttataatttcttatgcctgtcttta

SEQ ID NO: 4955 - DNA, 91 bp, homo sapiens
ttttaatagtcctgctatgaacatgcgtgtacacttaggcatttctgtctttttgctgttttaatagtcctgctatgaacatgcgtgtaca

SEQ ID NO: 4956 - DNA, 108 bp, homo sapiens
tcctttagctagacacaaaagttctccaagcccccaccagattagctagacacagagtgctgattggtgcgtttacagtcctttagctagacacaaaatttctccaag

SEQ ID NO: 4957 - DNA, 117 bp, homo sapiens
atgattgaaatataaatggagccccattttcttatttaatggtgttgtattaacagctacttgtatatgtttcaattataatgattgaaatataaatggagctccattttcttattt

SEQ ID NO: 4958 - DNA, 106 bp, homo sapiens
tcatctacgaacaactcataaatgatcccaaaactcatacacaaaaccttttaaccaacatgtatttgggatggtaactcatctatgaacaactcataaatgatcc

SEQ ID NO: 4959 - DNA, 109 bp, homo sapiens
tactttttcttaacacggacacctgattcactgttctgctaccatttagcagcagactgataattaatattaaccagagtggctactttttcttaacacagacacctga

SEQ ID NO: 4960 - DNA, 127 bp, homo sapiens
tgataaatgtccatgaaatcttcacaattcatgttcagagactgcagtaaagacaggcatacaaaattataaaagtattaattttggaaactgataaatgtccatgaaatcttcacaatttatgttc

SEQ ID NO: 4961 - DNA, 101 bp, homo sapiens
atgtgaagatggagcatagaaagattgacacaggcagaagagaagacacacacacacacacagaggaggaggtgatgtgaagatggagcatagaaagattg

SEQ ID NO: 4962 - DNA, 104 bp, homo sapiens
tgataggttgtcttttcactctgctgattattaaacccttattggatgtgtgatttgtaaatattttctcccatatgataggctgtcttttcactctgctgatt

SEQ ID NO: 4963 - DNA, 73 bp, homo sapiens
atattagtattatatcaatactatgtacgatatatagtacaatataatgtacaatagtattatatcaataata

SEQ ID NO: 4964 - DNA, 106 bp, homo sapiens
tctgaattttttaataaataattttgcataatttatattactataaaatttgtacattctaaaatatgttcattgttattaatctgaatttttaataaataatttt

SEQ ID NO: 4965 - DNA, 89 bp, homo sapiens
acttctcagcaagctctattcattgttaagggtctcattgttaacagaagtaacagagttacttctcagtaagctctattcattgttaa

SEQ ID NO: 4966 - DNA, 127 bp, homo sapiens
gaacataaattgtgaagatttcatggaaatttatcagtttccaaaattaatacttttataatttcttaggcctgtctttactgcaatctctgaacataaattgtgaagatttcatggacatttatca

SEQ ID NO: 4967 - DNA, 97 bp, homo sapiens
ttctttctctaagtccctgtgctgacatataaccctcataccctatgctggccctaaacttgttctttctctacgtccctgtgctgacatataaccc

SEQ ID NO: 4968 - DNA, 99 bp, homo sapiens
attatttggtgaataattatttggtgaataatctgtagtgattatttagtgtacagattatttggtgtacagattatttggtgaataatctgtagtgat

SEQ ID NO: 4969 - DNA, 93 bp, homo sapiens
tttagacttcttttcctaatatggaaggctgtctaatatggaagccttctaatatttaatatagattttagatttcttttcctaatatggaag

SEQ ID NO: 4970 - DNA, 88 bp, homo sapiens
tgaaacattgtattctcggtctgtaattgctgagaaagggatggaataaaggtgaagggcctgaaacattgtattctctgtctgtaat

SEQ ID NO: 4971 - DNA, 81 bp, homo sapiens
aggttgtaggaaaccatattatattatattacattatattatattatagtatagtatattacattatattatattatatta

SEQ ID NO: 4972 - DNA, 149 bp, homo sapiens
agctgggattacaggcacatgctggctggctaattttttgtattttttttagtagaggcaggcagggtttcaccatgttgtccaggctggtctcaaactaagctgggattacaggcacatgctagctggctaattttttgtattttttt

SEQ ID NO: 4973 - DNA, 87 bp, homo sapiens
tcagattattgttaaattttacctcatttactttatcaattgctctttctctatttatgtgtatcagattattgttaaatgttacct

SEQ ID NO: 4974 - DNA, 71 bp, homo sapiens
tcttctgccatgtgaggacacagcatttgtcccagtttcctcttttgttcttctgccatgtgaggacactg

SEQ ID NO: 4975 - DNA, 95 bp, homo sapiens
aattaataaacaattagtagaattgacattgggatttccagacttaccttaaggtataagtgcttctttgtgtttattaaacaattaataaacaa

SEQ ID NO: 4976 - DNA, 216 bp, homo sapiens
tttcatttctttttcttatctctttccactcagtgggccttccagtacaatgctgactaggagtagtgagagaggacatccattttattttatttttttattttgttttattttattttattttatttatcgtattttatcttattttatcttactttatctatcttattttatcttattttatcttattttattttattttatcttattttgaga

SEQ ID NO: 4977 - DNA, 102 bp, homo sapiens
ttgtaaacacaccaatcagcaccctgtcagaacagaccaatcagttctctgtaaaacagaccaatcagctctctgtaaaatggaccaatcagcaggatgtgg

SEQ ID NO: 4978 - DNA, 83 bp, homo sapiens
cattaaacaagtcttaataaatttaataatattttcaaaatagactgtatcttaggccataaaacaagtcttaataaatttaa

SEQ ID NO: 4979 - DNA, 114 bp, homo sapiens
ttttatatttattttagtgtagtgagcagtgggatgtcatttataatatacataaaatatttatatttagtattttatatttattttagtgtagtgagcagtgggatgtcattt

SEQ ID NO: 4980 - DNA, 218 bp, homo sapiens
ttgagcacaggaaggtgagttaagaggcattccatttacatggaatgactgagaactaattgatacattaaattcaccttgagcataggaaggtgagttaagaggaatatatgctaaggatctgtgtgccagatcctatatgctaagaaatacatgctaaggatctacttatatatagcacacatgtaaggaatatatgctatggatctgtgtgccag

SEQ ID NO: 4981 - DNA, 92 bp, homo sapiens
gattttgctttacaaaaatatttgctttataaaaatattgctttttttggcttgtgaaaatttttttgctttataaatatatttgctttata

SEQ ID NO: 4982 - DNA, 95 bp, homo sapiens
tcatctgatttagtcttgttacatatggctaatctgatttagtcttgttacagattcctacatatggctaaatcatctgatttagtcttgttata

SEQ ID NO: 4983 - DNA, 89 bp, homo sapiens
tctaggttcatcagggatattggcctgtagttctgtttgctagtattttgttgaggagttttgcttctaggttcatcagggatattgca

SEQ ID NO: 4984 - DNA, 108 bp, homo sapiens
tctccccaccagaaagttcaactagcaactatccattgcagaataggaaatctgaggcttaatttccttctctccccacaagaaagttcaactagcaactatccattg

SEQ ID NO: 4985 - DNA, 76 bp, homo sapiens
atggccggttcctgccttaactgataacattccaccacaaaagaaatgaaaatggcctgttcctgccttaactgat

SEQ ID NO: 4986 - DNA, 95 bp, homo sapiens
ataaaagatatcaaaaagaaataaatgatatcaaaaagaaatataaatataatgatatcatgatatcaaatttgatacgatatcaaaaacaaata

SEQ ID NO: 4987 - DNA, 84 bp, homo sapiens
acccatacatacctctgtgacacacataccgtgtaatactacatatatatatatacccatacgtacctctgtgacacacatacc

SEQ ID NO: 4988 - DNA, 105 bp, homo sapiens
tgtttactaagagcagattgatacttcattaaaaaaaggagagaaagaaacaaacatactgtttaacttgtttactaagaacagattgatacttcattaaaaaaa

SEQ ID NO: 4989 - DNA, 118 bp, homo sapiens
ttttcagtttgtgtgtgtctttataggtgaagtgtggttcttgtaggcaacagatctgtgggtcttgcttttttttccatccctttattttgagtttgtgtgtgtctttataggtgaa

SEQ ID NO: 4990 - DNA, 98 bp, homo sapiens
tatgatagtatcaatatacttagtaatttgtatttaaatcatactgtatacttagtatcaatattagtatcaatatatgatagtaacaatatacttag

SEQ ID NO: 4991 - DNA, 95 bp, homo sapiens
ctgattggtgcatttacaatcctatagctagacacagagtgctgattggtgtgtttttacagagtgctgattggtgcatttacaatcctttagct

SEQ ID NO: 4992 - DNA, 92 bp, homo sapiens
actggaagcattactactgattctacagaaatagaattgtattctttttatttctggaatacactggaagcattaatactgattctacagaa

SEQ ID NO: 4993 - DNA, 100 bp, homo sapiens
gcaacctccctacaaaaatggcatatatagagagagagagaaagagagagagagagtgtgtgtgtgtgtgtgtgtgtgcaacttccctacaaaaatggca

SEQ ID NO: 4994 - DNA, 102 bp, homo sapiens
aaggaacatagatattgatagaaatagaatacagccataattaaatgtaagattacatattgagtatattggttccaaggaacatagacattgatagaaata

SEQ ID NO: 4995 - DNA, 119 bp, homo sapiens
agcaccaccatgcctggctaacttttaatatatgtaatatttaaatactaaatatataatatatataaatattataaatagcaccaccatgcctggctaacttttaacatatgtaatat

SEQ ID NO: 4996 - DNA, 98 bp, homo sapiens
tttaggatcctctgggttaatatcaactcccactatcctattattttccttgactttacaataatctaggtttaggaccctctgggttaatatcaact

SEQ ID NO: 4997 - DNA, 105 bp, homo sapiens
aggaacatcacttaaattcattttctatttttttgtggcaattgacttttaaattgtgtgtttattgtattggtggcattgaggaacatcactttaattcatttt

SEQ ID NO: 4998 - DNA, 78 bp, homo sapiens
tgggaaagttcggaacttcctagaaacttggagggctcagaagtcagaaagatatgggaaagtttggaacttcctaga

SEQ ID NO: 4999 - DNA, 77 bp, homo sapiens
tgctgatcaatattcagtgaacactggggcgtaggtagcttcctcacacacacgtgctgattaatattcagtgaaca

SEQ ID NO: 5000 - DNA, 119 bp, homo sapiens
ggaatgaatttggcaagaatgtaaagaaagcacagtgaacaaggagagagcaaaaggcaataggactgttgaggtaggtcctggacaggaatgaatttggcaagaaagtaaagaaagca

SEQ ID NO: 5001 - DNA, 128 bp, homo sapiens
aggtcagttttagtatctttaatttagaggctaatttatgaaagatatatatagagagagttatgaaatacatacatatatatataggtcagttttagtatctttaatttagaggctaatttgtgaaa

SEQ ID NO: 5002 - DNA, 143 bp, homo sapiens
taataaatgtccatattaaaatgaaatcttcacaatttatgttcagagatttcagtaaagacaggcataagaaattataaaagtattaactttgggaactaatatatgtccatattaaaatgaaatcttcacaatttatgttc

SEQ ID NO: 5003 - DNA, 77 bp, homo sapiens
tattgtatttttaagcaaacctttaatattttaagattgtattttaattttaatattgtatttttaagcaaactttt

SEQ ID NO: 5004 - DNA, 121 bp, homo sapiens
gaagggcaaaaagcagaacaaagatgacatgcttctgagggaagaggacaaagggcaaaagcagaactactaataagggtccaacaaagatcacaaggcaaaggacaaaagcagaactact

SEQ ID NO: 5005 - DNA, 87 bp, homo sapiens
aacctaaaagcaatgtctttttctgtgttaagtagtgcatactatgcctcttaaaaaattaaacctaaaagcaatgtctttttttgt

SEQ ID NO: 5006 - DNA, 117 bp, homo sapiens
tataaccaatcatatttgcatacacattccagaatgtgtactttactaacttagaaagtacccggtgtcaagattgacctcatataaccaatcatatttgcatacacattccagaat

SEQ ID NO: 5007 - DNA, 82 bp, homo sapiens
agaagacaggaaaatgtgggaaagtttggaacttcctagagacttggagggctcagaagacaggaagatgtgggaaagtttg

SEQ ID NO: 5008 - DNA, 88 bp, homo sapiens
gagctaccctctctgctgagagctgaacacttcttgggacaacctgcctgtggaaaagagctaccctctctgctgaaagctgaacact

SEQ ID NO: 5009 - DNA, 134 bp, homo sapiens
gtaacaactcagatatgctataatatggcatgaattagagtagtaacaattcagatatgctataatatatatattatttaatatacataatatacataataaattattgtaacaattcagatatgctataatat

SEQ ID NO: 5010 - DNA, 112 bp, homo sapiens
tcctcccagaccacaaagaggaccaaggaagttcggatttagtggcccttactgatgtattctcgaaaacctgcacccctgcctgtcctcctagaccacaaagaggaccaag

SEQ ID NO: 5011 - DNA, 86 bp, homo sapiens
ttttatgtcttatatttgccttttaggtatagaatgaatgtcccccttctttttttctagtagttttatgtcttatatttgccttt

SEQ ID NO: 5012 - DNA, 137 bp, homo sapiens
agtcaaggcagtagaaattaaacccacttctccttgtctagatctatatcagctataagactggcattgtgttttgtgaaggaaggaaagaagttagtcaaggcagtagaaattaaacgcacttctccttgtctaga

SEQ ID NO: 5013 - DNA, 125 bp, homo sapiens
tgggtaaattgtgtgtaacagaggttttgggtacagataatcttttattttaggttcagcaggtacatgtgcaggtttgttacttgggtaaattgtgtgtaacagaggtttggggtacagataat

SEQ ID NO: 5014 - DNA, 91 bp, homo sapiens
ataagtacctagagtaggtacttatatgaggtacttggaatgttgtatggaatgttgcatgcttcctgtaagtacctattgtaggtactta

SEQ ID NO: 5015 - DNA, 117 bp, homo sapiens
atcctctgaccccctcccacctgctccttggcctgacttcagcaagaatccccctaaccttgacgtctcctcttagtaattttctatcctctgaccccctcccacctgctccttggc

SEQ ID NO: 5016 - DNA, 122 bp, homo sapiens
gtggtgacaggcacctgtagtcccagctactcaggaggctgggacaggtgaaccccatctctactaaaaatagaaaaaacttagctgggcgtggtgacaggcacctgtagtcccagctactc

SEQ ID NO: 5017 - DNA, 95 bp, homo sapiens
ttgtctttattttctgttatatatgtgttgtaaaagtacactacattagaagggagcttttccgttgtctttattttctgttatacatgtgttgt

SEQ ID NO: 5018 - DNA, 110 bp, homo sapiens
tgtcatattctctcaatagaaaaattgttaataccctaaagaaatcattgtagaggggggattcgccatgttgtcatattctctcaatagaaaaattgttaataccctaa

SEQ ID NO: 5019 - DNA, 107 bp, homo sapiens
atttttgctgttgtgattgtgctgctatacaatttctttatccactcattgattgatgggcatttgggctggttccacatttttgcagttgtgattgtgctgctata

SEQ ID NO: 5020 - DNA, 86 bp, homo sapiens
gacagatgttgaaggtcctaattccaagtgccctgaccccagtcctgcagcgcaagagacaggtgttgaaggtcctaattccaagt

SEQ ID NO: 5021 - DNA, 108 bp, homo sapiens
ttagctagacacagagtgctgattggtgcattcacagactctgagctagacacagagtgctgattggggcatttacaaaccttgagctagacacagagtgctgattgg

SEQ ID NO: 5022 - DNA, 98 bp, homo sapiens
tctccttgtctctaccccttctctgcttttctgggagaggggcaagtacccctcaaccccttctctccttgtctctaccccttctctgctttcctggg

SEQ ID NO: 5023 - DNA, 60 bp, homo sapiens
gtcttcacagttccctgggcttcacagggaagcccaggaagcctcggttccctgggcttc

SEQ ID NO: 5024 - DNA, 121 bp, homo sapiens
aaggtctgcagcttcactcctgaggccagcgagacccctaacccacggggaggaatgaacaactccagaagcaacactcaccgcgaaggtctgcagcttcactcctgaagccagcgagacc

SEQ ID NO: 5025 - DNA, 93 bp, homo sapiens
ggcatgggaagggtaaacagtcctggggaccttgtagctccctgaatgtgccatgttttcaggggcatgggaagggtaaacagtgctggggac

SEQ ID NO: 5026 - DNA, 89 bp, homo sapiens
cttctctacatatactcatttctttgttacagcagccatgggaaatgaatacagaccccttttcttctctatatatactcatttctttg

SEQ ID NO: 5027 - DNA, 186 bp, homo sapiens
ggctagatacagagtgtcaattggtgcattcacaaaccttgagctaaacacagggtgctgactggtgtgtttacaaaccttgagctagatacagagtgccgattggtgtatttacaatccctgagctagacataaaggttctccaaggccccaccagagcagctagatacagagtgacgattggtg

SEQ ID NO: 5028 - DNA, 74 bp, homo sapiens
atttttagtagagagggggtttcatcatgttagcccggctaattttttgcatttttagtagagagggggtttca

SEQ ID NO: 5029 - DNA, 123 bp, homo sapiens
aaatgtccatgaaatcttcacaatttatgttcagagattgcagtaaagacaggcataagaaattataaaagtattaatttggagaactaacaaatgtccatgaaatcttcacaatttatgttc

SEQ ID NO: 5030 - DNA, 108 bp, homo sapiens
tgagactttttaaaaattgaaattgccagactataggaagagatcaagcaacttatccgaggttaaaaagatatttaatgagactttttaaaaattgaaactgccaga

SEQ ID NO: 5031 - DNA, 89 bp, homo sapiens
gcttttctggggaaggggcaagtaccccaaccccttctctccttgtctctaccccttctctgcttttctgggggaggggcaagtacccc

SEQ ID NO: 5032 - DNA, 233 bp, homo sapiens
agtctcctgtcggctgagggcttcagagacaacagggccacctgcctgcccataggagctacagaccctgggtctcctttctgctgagggccgtgcagacgtcgaaacaacatgcctgcatatagaccaactctgggtctcctctctgctaagagctgcacactcatcaggacaacctgtgtacggaaaagagctactcacttcaggtctcctctctgctaagagctgcacac

SEQ ID NO: 5033 - DNA, 237 bp, homo sapiens
tcaaaaaaacagaaaaagagagagagaagagagagagagaaagagagagagagagaaagaaagaaagaaagaaagaaagaaagaaagaaagaaagaaagaaagaaagaaagcaaaggaagaaagaaagcaagcaaaggaaggaaggaaagaagaaagaggaaggaaggaagtaaacagaaagaaagaaagaaagaaagaaagaaagaaagaaagaaagaaagaaagaaagaaagaaa

SEQ ID NO: 5034 - DNA, 83 bp, homo sapiens
attatattaacaagatattgatatatcttattttatattatattttattatttaatctatattatattaacaagatactgata

SEQ ID NO: 5035 - DNA, 115 bp, homo sapiens
agtggagtgagttgacaaggaagaaagtgcccaaggaaaggaaaggaaaggaaaggaaaaagaaaagaaaggaaagaaaagagagtggaatgagttgacaaggaagaaagtgccc

SEQ ID NO: 5036 - DNA, 94 bp, homo sapiens
tgtctccagacacactcccgatttcctaaccagaactcagactctcctatcagccagagggaggactctgtctccagacacactcccgatttcc

SEQ ID NO: 5037 - DNA, 148 bp, homo sapiens
caaaggtaataattcatttctctacctttgaaaagcctctctgtatcttgttaccattttattgaataactcttcttaataacttttctgacccctcccaaaggtaataattcatttctctacctttgaaaagcctctctgtatcttg

SEQ ID NO: 5038 - DNA, 88 bp, homo sapiens
aaactaggatcttaaaatggagaaatcaatggtatcaatcaatttaatggaactgggttcctgaaactaggttcttaaaatggagaaa

SEQ ID NO: 5039 - DNA, 104 bp, homo sapiens
agacctacctagaaattcaataccttgtccagagagagagagagattgaaattgagaattgaggggaaggggagacctacctagaaattaaataccttgtccag

SEQ ID NO: 5040 - DNA, 89 bp, homo sapiens
aaaacaaaaattagctgggcatggtggcacatgcctgtaatcccagcaaaacaaaacaaaacaaaaaattagctgggcatggtggcaca

SEQ ID NO: 5041 - DNA, 95 bp, homo sapiens
tcctttagctttctctgaccaaggtatatgcctgtagcattttttgttttgttttgttttgttgcttttattcctttagctgtctctgaccaagg

SEQ ID NO: 5042 - DNA, 73 bp, homo sapiens
ttaagaagagatgtgtaccattgactgaatgagtatttctgaatatcagtttaagaagagatgtgtaccattg

SEQ ID NO: 5043 - DNA, 103 bp, homo sapiens
gtctctactaaaaatacaaaaaatgagaggccaaggcgggcagatcacgaggtcaagagaacacccacattgtgaaacctgtgtctactaaaaatacaaaaaa

SEQ ID NO: 5044 - DNA, 120 bp, homo sapiens
tcattttgctcatctgtaacataatcacaggcttgcctccacaatttattgctgggtaaagttgagcaagttactcaacctctctgaagtcattttgctcatctgtaacataatcacagg

SEQ ID NO: 5045 - DNA, 89 bp, homo sapiens
tattttttaataatcacagacattgtagcaatgtcaaatctgctgtttataaaattcagtatattttttaataatcacagtcattgtag

SEQ ID NO: 5046 - DNA, 135 bp, homo sapiens
tatttctcctagctgaatagtataggaaaacttaaccatatatatgtacacatatatgtgtgtgtgtctgtgtgtgtgtgtatatatatatatttctcctagctgaatagtataggaaaccttaaccatatatat

SEQ ID NO: 5047 - DNA, 95 bp, homo sapiens
ctgagcttcctaacaagcagcaagtaagtgtaagatcccacatacccattacatgtgggctatatgtcaacactgagcttcttaacaagcagcaa

SEQ ID NO: 5048 - DNA, 94 bp, homo sapiens
agaataataatagtacctatctgataggcactacaaaatgagaataataataatacctggaaaacaagaataataatagtacctatatgatagg

SEQ ID NO: 5049 - DNA, 73 bp, homo sapiens
acaaaagttctccacgtacccactagattagctagatacagagtgtggacacaaaagttctccacgtccccac

SEQ ID NO: 5050 - DNA, 77 bp, homo sapiens
tatgcatcattcctttgtggacttccctccttctgggaatgtgtgtctttaatctatgcaacattcctttgtggact

SEQ ID NO: 5051 - DNA, 98 bp, homo sapiens
attcacctgtagggatctgacaaaggcctggcagctctgaaattttaagggcctgcactgtaattcacctgtaggggtctgacaaaggcctggcagct

SEQ ID NO: 5052 - DNA, 103 bp, homo sapiens
gaccatttcgggttcttgggcaagaggagtttctgctgctgcatcagtgagcacaactactctggtcagcagggttcagtgaccattgcgggttcttgggcaa

SEQ ID NO: 5053 - DNA, 103 bp, homo sapiens
gcctaggaaattcagctagtcctgtctctcagtccccactctcaacaggaaaacccaagtgctattagttggcctaggaaatccagctagtcctgtctctcag

SEQ ID NO: 5054 - DNA, 97 bp, homo sapiens
aatttaaggagacatttttatgatattgagtttatgatattggaaacaaattaaatctgtagttcaatttaaggtgacatttttatgatattgagtt

SEQ ID NO: 5055 - DNA, 95 bp, homo sapiens
ggctccaggccttcccaaggccaggtcagttcctggagccctcaggatgaggtcagcacctgtggacatgggctccaggccttcccaagaccagg

SEQ ID NO: 5056 - DNA, 83 bp, homo sapiens
ttgattgtttcttgggctatcatttaactatatccatacttttctatgtaatatatttgattgattcttgggctatcatttaa

SEQ ID NO: 5057 - DNA, 75 bp, homo sapiens
cccaagtggggcaggaaaccagcatttctcaatttctcaaaacccggcatttcccaagtggggcaggaaaccagc

SEQ ID NO: 5058 - DNA, 95 bp, homo sapiens
aattggatcattgaaagtatgtgtgtgtgtgtctgtgttcatcttctagtatcaggcatggagacaaggaattggatcattgaaagtacgtgtgt

SEQ ID NO: 5059 - DNA, 80 bp, homo sapiens
caagtctctaggaagttccaaactttcctacatcttcctgtcttctgagctctccaagtctctaggaagttccaaagttt

SEQ ID NO: 5060 - DNA, 125 bp, homo sapiens
ataaatgtccatgaaatcttcacaatttgtgttcagagattgcagtaaagacaggcataagaaattataaatgtattaatttggggaactaataaatgtccatgaaatcttcacaatttatgttc

SEQ ID NO: 5061 - DNA, 125 bp, homo sapiens
gaacataaattatgaagatttcatggacatttattagttccccaaattaatacttttataatttcttatgcctgtctttactgcaatctctgaacataaattgtgaagatttcatggacatttat

SEQ ID NO: 5062 - DNA, 98 bp, homo sapiens
agagcgagaccctgcctcaaaaaaaaaaaaaaaaatgatgtgtcactgcattccagcctgggagatagagcaagaccctgcctcaaaaaaaaaaaaaa

SEQ ID NO: 5063 - DNA, 111 bp, homo sapiens
cagagatcccacttaaggacacaagataaatttaagtcttgatttagggaaatatttttttgtttccaggaagtaaaaaataccagagatcccacttaaggacagaagata

SEQ ID NO: 5064 - DNA, 106 bp, homo sapiens
aaagaaagaaagagagaaagacagagagaaagagagagagagagaggaaggaaggaaggaaggaaggaaggaaggaaggaaggaaggaaggaaggaaagaaggaag

SEQ ID NO: 5065 - DNA, 160 bp, homo sapiens
ttgctacttgcaaaagacaaccttaatatataagagcagataaagcttaatgctacttgcaaaagacatgcttagtatataagagcagataaagttttaaagtaaaggagtaataagctttatgctacttgcaaaagacatgcttaatatataagagcag

SEQ ID NO: 5066 - DNA, 113 bp, homo sapiens
gattaacttaaagaaattggttaaaatataaatattgtttaaatttgttaaaataaaacttggttaaattggttaaaaatagaaataggttaaaatataactattgtttaaat

SEQ ID NO: 5067 - DNA, 108 bp, homo sapiens
agccaaatcatgagtgaaccgcgattcacaatgtgcaaaaatcagaagcattcctatacgccaataatagacaaacagccaaatcatgagtgaaccgcaattcacaat

SEQ ID NO: 5068 - DNA, 130 bp, homo sapiens
tacactgtttgttgacattaagcaagtacacctggtgagcagaaaaaaattgatcatttcaaaattctgcagaacatgattctggtacactgtttgttgacattaaacaagtacacctggtgagcagaaa

SEQ ID NO: 5069 - DNA, 91 bp, homo sapiens
taagtaaaatgtggtacatatacacattggaacactatgtccaccagtgacagtttgaataagtaaaatgtggtacatatacacaatggaa

SEQ ID NO: 5070 - DNA, 100 bp, homo sapiens
ctctcagcttaatttcctttagcatttcttgtaagacaggactcctagtgatgagctccctcagctttttctctcagcttaaattcctttagcatttctt

SEQ ID NO: 5071 - DNA, 172 bp, homo sapiens
cctttttacagagagctgattggtctgttttgacagggtgctgattggtgcgtttacaaaccttgagctagatacagagtgttgattggtgcatttacaatcctttagctagacacaaaagttctccaagtccccaccagatttgctagatacagagtgctgattggtgcat

SEQ ID NO: 5072 - DNA, 108 bp, homo sapiens
agctagatacagagtgtcaattggtgcattcacaaaccctgagctagacacagggtgctgattggtgtgtttacaaatcttgagctagatacagagtgccaattggtg

SEQ ID NO: 5073 - DNA, 151 bp, homo sapiens
ctgcttttctgggggaggggcaagaatcccaaccccttctctccgtgtctctaccccttctctgcttttctgggggaggggcgagaacccctcaaccccttctccttcacccttagcggcaagtcccgcttttctgggggaggggcaggaa

SEQ ID NO: 5074 - DNA, 81 bp, homo sapiens
tctaagaagttccatactttcccacatctttctgtattctgagccttcccagtttctaagaagttccaaactttcccacat

SEQ ID NO: 5075 - DNA, 181 bp, homo sapiens
cacacttttaaactaaaaaagaattgaggaaggcacagctcacacgagtgtgaaaacctaatcaccacacttttaaactaaaaaagaatttttgaacatgcaggctgggctgacatgggttatgatgaatgcagctgaagttgagaggaaatgaaaggctgtttgcagggtgagtggacac

SEQ ID NO: 5076 - DNA, 132 bp, homo sapiens
tttgaacatgcaggctgggctgacatgggttatgatgaatgcagctgaagttgagaggaaatgaaaggctgtttgcagggtgagtggacactttgaacatgcaggctgggttgacatgggttatgatgaatg

SEQ ID NO: 5077 - DNA, 89 bp, homo sapiens
aagagtttcagattaaggtttcttaataacacgttcttaataataagagtttcagattaagagtttcagattaaggtttcttaataaca

SEQ ID NO: 5078 - DNA, 89 bp, homo sapiens
tgccacatagcaaaataaaaaggctatgtagcaaatttctcaatgattgatgatggcaattttgtgccacatagcaaaataaaaaagct

SEQ ID NO: 5079 - DNA, 95 bp, homo sapiens
attcatttctcagttattttacttctctggcaattttactatttactattaaatgtttactattcatttctcagttattttacttctctggcaat

SEQ ID NO: 5080 - DNA, 132 bp, homo sapiens
aagttgattgatgagtaagagtagctactagacttattggactagttacacttattggacactgatgacattatgttgattgtaagttgattgatgagtaagagtagctactagatttattggactagttac

SEQ ID NO: 5081 - DNA, 63 bp, homo sapiens
tttttaatactctactccttactctactaaggtagagtattctttaatactctactcctgtat

SEQ ID NO: 5082 - DNA, 87 bp, homo sapiens
ccttcacccttagcggcaagtcccacttttctgggagaggggcaagtacccctcaaccccttctccttcacccttagtggcaagtcc

SEQ ID NO: 5083 - DNA, 102 bp, homo sapiens
cttggagaacttttatgtctagcttaaggtttgtaaatgcaccaatcagtgttctgtgtctagctaatctagtagcgacttggagaacttttatgtctagct

SEQ ID NO: 5084 - DNA, 86 bp, homo sapiens
gagaacaatttctctactacccaatgaatcatgggagagactttttcagagaacacttttgagagaacaatttctctgctacccaa

SEQ ID NO: 5085 - DNA, 103 bp, homo sapiens
cacacacacagaagcaggggatattgctgagacacaggagtaaaaagatggccacatacacacacacacacacacacacacacacacacagaagcaggggaca

SEQ ID NO: 5086 - DNA, 77 bp, homo sapiens
agaagacaggaaaatgtgggaaagcttggaacttcctagagactatgagggctcagaagacaggaagatgtgggaaa

SEQ ID NO: 5087 - DNA, 79 bp, homo sapiens
gtagagacagtcctgctgtctcaaaatcctgtcttcacaggtggtttcaggaaagtagagacagtcctgctgtctcaaa

SEQ ID NO: 5088 - DNA, 98 bp, homo sapiens
caacagtagcagatcagtagacaggccaaaaaaacagaaaaaagcaagaagcctagttatctaatacaacagtagcagatcagtagacaggcaaaaac

SEQ ID NO: 5089 - DNA, 165 bp, homo sapiens
tgttgaccataagttcaccaaattgttcattctttctctcacctacctcatcctatattgtttattatttacctaaattgtttattcagttaagtaaattaaacaatttagtttactcaatttattcaaaataattattattgtttattatttacctaaattgtt

SEQ ID NO: 5090 - DNA, 87 bp, homo sapiens
aaaggccctatctcttaatactatcatgattacaaatatatcatgatataattacctcacaaaggccccatctcttaatactatcat

SEQ ID NO: 5091 - DNA, 178 bp, homo sapiens
aaaaaaaaaaagaagaaagaaagaaagaaaagaaagaaggaaggaaggaaggaaggaaggaaggaaggaaggaaggaaggaaggaaggaaggcaggcaggcaggcaggcaggcaaggcaaggcaaggcaaggcaggaaggaaggaaggaaggaaggaaggaaggaaggaaagaaagaa

SEQ ID NO: 5092 - DNA, 86 bp, homo sapiens
agaggctgaagtgaagttacaatggttatgcttctatgcaaaggaagacttagcccccagtcagaggctgaagtgaagttacaaag

SEQ ID NO: 5093 - DNA, 113 bp, homo sapiens
atagtcctctgtgctatcctggaacatcaagtttcctcaccaccaccattccctcaggtcaggctttccatacccttgtattatagtcctctgtgctatcctggcacatcaag

SEQ ID NO: 5094 - DNA, 97 bp, homo sapiens
ctcatttctcttcacaaagcccagtgaaatcagaattcaatgacacggggttctgtattaagtgctatcttatctcatttctcttcacaaaacccag

SEQ ID NO: 5095 - DNA, 117 bp, homo sapiens
agttaatgcataaaaagtacttaaatatttcaagacaaatggtaagttaatgcataaaaagtacttaaatattgcaagataaatggtaagttaatgcataaaaagtatttaaatatt

SEQ ID NO: 5096 - DNA, 100 bp, homo sapiens
tcaccttagaagttgcataatgtcactttcattgcatcctgttggtcaaagccagtcacaaagctaggccaagtttatcaccttagaagttgcataacgt

SEQ ID NO: 5097 - DNA, 128 bp, homo sapiens
gttgtgtttagcaacaaataacagaaagtgcagtaaagatagtttaagcctctagacttgaatttgggatgctatctgcgttgtgtttagcaacacataacagaaagtgcagtaaagatagtttaagc

SEQ ID NO: 5098 - DNA, 231 bp, homo sapiens
gatctttagtacacataggaatctttagtacaaatctttagtacacataggaatctttagtacacataggaatctttagtacacataggaataccgcctttcaaatctttagtacacataggaatcccaccttcctaggtctaggcagggggctgatgatctttagtacacataggaatctttagtacaaatctttagtacacataggaatctttagtacacataggaatc

SEQ ID NO: 5099 - DNA, 100 bp, homo sapiens; identical to SEQ ID NO: 5096

SEQ ID NO: 5100 - DNA, 128 bp, homo sapiens; identical to SEQ ID NO: 5097

SEQ ID NO: 5101 - DNA, 106 bp, homo sapiens
actggccaacctttgggtagaattataaaattctgcccaaaattctaccaaattactggtacttgtaaaattctaccaaataactggccaacttttgggtagaatt

SEQ ID NO: 5102 - DNA, 104 bp, homo sapiens
cttaactggatgtagctctttaaaaactaactgttcttctccctttatcttttcttctttctttcctaccaattttttccttaactggatgtaactctttaaaa

SEQ ID NO: 5103 - DNA, 99 bp, homo sapiens
tatttatacataagagggacttatatataatataatataaatgtatatttatattataaatagtataaatgtatgctatttatacataagagggactaa

SEQ ID NO: 5104 - DNA, 79 bp, homo sapiens
atataaataaggtctctctatttaaacaaaagatgaaagattaaaaacaaaatacatataaataaggtctctctattta

SEQ ID NO: 5105 - DNA, 111 bp, homo sapiens
catctataagctgtaaccatcaacatcctctgtacaaggatgtacaacatcctcagtggcaagcaacctctaaagagtctgacatctataagctgtaaccaccaacatcct

SEQ ID NO: 5106 - DNA, 80 bp, homo sapiens
cttgtcattacattgcatagaaaaagtgctttacgttaaaagtggcttacattacacttgtcattacattgcacagaaaa

SEQ ID NO: 5107 - DNA, 99 bp, homo sapiens
gaaaatgtatgtatagtgtgatgtgtgcctaagtatattaatgttagtgctataagaataaaactaaatgtgaaaatgtatgtatagtgtgatgtgtgc

SEQ ID NO: 5108 - DNA, 99 bp, homo sapiens
ggtagctcctttctgcaggcaagttgtcctcatgaatgtccagctctcagtggagaggagacctgcagtgggtagctcctttctgcaggcaggttgtcc

SEQ ID NO: 5109 - DNA, 76 bp, homo sapiens
accacaatgctcaaaatgcacaaatgatcaaaatgcacaaatgcaaatcaagaccacaatgctcaaaatgcacaaa

SEQ ID NO: 5110 - DNA, 92 bp, homo sapiens
tacaaatgaggattgcagtttctggttagagggttttaagtgcatggaaaatgaattccggatacaaatgaggattgcagtttctggttaga

SEQ ID NO: 5111 - DNA, 149 bp, homo sapiens
ttgggatgggggaaatgagagatgagaaaggtctataggtcctggctgaagagggtaaagaaagaaaaattctgatgggacggggatttgagatttgggatgggggaaatgagggatgagaaaggtctataggtcctggctgaagaggg

SEQ ID NO: 5112 - DNA, 148 bp, homo sapiens
tatatatataaaaaatatatatgtatatatgaaataatgtataaatatatttgcacattgtgtgttgaataatagcctaaaatacctatatgtgtgtgtatatatataaaatatatatgtatatatgaaataatgtataaatatattt

SEQ ID NO: 5113 - DNA, 84 bp, homo sapiens
attttctactttttataaagtaaacctgttattatatattttatctgctttcctgtatttcctactttttataaagtaaacctg

SEQ ID NO: 5114 - DNA, 85 bp, homo sapiens
ctactactgcactccagcctgggtaacccaggaggcagaggttgcagtgagccaagatcacactactgctgcactccagcctggg

SEQ ID NO: 5115 - DNA, 99 bp, homo sapiens
tcttcttcttgttcttcttcttgttcttacttgttcttcttcttcctcctcctcctcctccttctccttctcctcctcgtcctcctcctcttcctcctc

SEQ ID NO: 5116 - DNA, 81 bp, homo sapiens
tgatgttgggcaaataacttcaaaattcggagcgttgctacctgctagctctgtgatgttgagcaaataacttcaaaattc

SEQ ID NO: 5117 - DNA, 78 bp, homo sapiens
gcctgtaatcccagcactttgggaaagaattattggctgggcgtggtggcttacgcctgtactcccagcactttggga

SEQ ID NO: 5118 - DNA, 151 bp, homo sapiens
tctctgaggcactgtttgtaatcattaaatagtttcttaggtctacatcccaaaatgatctcacctccaaagccctgatgagctagctagagaggattcatctctgaggcactgtttgtaatcattaaatagtttcctaggtctacatccc

SEQ ID NO: 5119 - DNA, 97 bp, homo sapiens
aaagtctatggtgatgataaatgtgatatcatatggtccctgccctcaagaagcagacaagaaactaatctcaaggtctatggtgatgataaatgtg

SEQ ID NO: 5120 - DNA, 103 bp, homo sapiens
ctgtctgttcctttctcatctaatctgagcattggaaagatgctccctagcagggtggagtcaggagcctgctgtctgttcctttctcatttaatctgagcat

SEQ ID NO: 5121 - DNA, 86 bp, homo sapiens
aagtcaagagacctgggctcaaatccagcatgggaataagtagggaggaaagaagggaagtcaagagacctgggatcaaatccagc

SEQ ID NO: 5122 - DNA, 93 bp, homo sapiens
aaactcctctttatatacatacgtgtgtgtgtgtgtgtgtgtgtatatatatatagataaaactcctctttatatacatacgtgtgtgtgtgt

SEQ ID NO: 5123 - DNA, 82 bp, homo sapiens
caacccacttcaacttgtgaggaatggtctgctaccctccctagccctcctcatgcgccaacccatttcaacttgtgaggaa

SEQ ID NO: 5124 - DNA, 82 bp, homo sapiens
tccaccgtcatgaccatcaccccccaataatggtagtaatcccaatcatgaggagggctccactgtcatgaccatcaccccc

SEQ ID NO: 5125 - DNA, 98 bp, homo sapiens
ttgaagtctcaatcccttagcttgcagctatgacttatcttggcttagggaaagtccccttggattggttgaagtttcaatcccttagcttgcagcta

SEQ ID NO: 5126 - DNA, 77 bp, homo sapiens
gatctttagtacacataggaatcccgctttcctaggtctaggcagggggctgatgatctttagtacacataggaatc

SEQ ID NO: 5127 - DNA, 92 bp, homo sapiens
gagtctcactctgtcacccaggctggattgattgattgattgattgattgattgattttgagatggagtctcactctgtcacccaggctgga

SEQ ID NO: 5128 - DNA, 76 bp, homo sapiens
tgtgctgacttctgaacttcacagaattttttattttttatttttttgcctattgtgctgacttctgaacttcacc

SEQ ID NO: 5129 - DNA, 170 bp, homo sapiens
ctgcatgttaccgtactaaatactatactaaatatttagtacagtactaaatactatactaaatatttagtacagtactaaatactatactaaatatttagtacagtactaaatactgtactaaatacaactgtaacacaatagtagatatttagtacagtattaaatac

SEQ ID NO: 5130 - DNA, 217 bp, homo sapiens
ggggctcctgcccctcccccagaaaaacaggacttgctgctaagggtgaaggagaaggagttgaggggttcttgcccctcccccagaaaagcgggacttgccactaagggtgaaggagacagggttgaggggttcttgcccctcccccagaaaagcagaaaaggggtagagacatggagagaaggggttggggttcttgcccctcccccagaaaagc

SEQ ID NO: 5131 - DNA, 76 bp, homo sapiens; identical to SEQ ID NO: 5128

SEQ ID NO: 5132 - DNA, 100 bp, homo sapiens
ctcctcaaaggtgaggacatacattaccaatattactcttaactcttaacattaccaacttaactcttagctcctcaaaggtgaggacacacattaccaa

SEQ ID NO: 5133 - DNA, 92 bp, homo sapiens
atggcagaccctggggtttagcaaagggaagctagtaaagaatgaggaggatcaacctggggttactgatggcagaccctggggtttggcaa

SEQ ID NO: 5134 - DNA, 122 bp, homo sapiens
tcattaattttggaaagctctttgctgttattacttcaatgtttggggttctctaaactttctatatctgtgatttggtgtctcattaattttggaaagctctttgctgttattacttcaat

SEQ ID NO: 5135 - DNA, 75 bp, homo sapiens; identical to SEQ ID NO: 4457

SEQ ID NO: 5136 - DNA, 113 bp, homo sapiens
ggtttagtaaatggatggacggacggacggacggacggacggatggatggatggatggatggatggacgatgaatggatgggtggctggttggatggatggatgggtggatgg

SEQ ID NO: 5137 - DNA, 104 bp, homo sapiens
attttacaaacctctagctagccacagagtgctgattgtgcatttttccagggcactgattggcacattttacaaacctctagctagccacagagcgctgattg

SEQ ID NO: 5138 - DNA, 126 bp, homo sapiens
aaatagggacccacacagttctaacctgtcttgttctagtatcaactagggatggcagaggtggaagaaactctgtacaaatagggacccacacagttctaacctgtctttttctagtatcaacta

SEQ ID NO: 5139 - DNA, 109 bp, homo sapiens
ccccagtagctcaaatcatggacttttgggaaatagggttattatagatgtcccctgacaaaaaaagatgttgaagtcctaacccccagtagctcaaatcagggacttt

SEQ ID NO: 5140 - DNA, 93 bp, homo sapiens
tttatcaagaataaaaataaatttttatataaaaataaatttataatttattaatatttataagaatttataagaataaaaataaatttttat

SEQ ID NO: 5141 - DNA, 89 bp, homo sapiens
atcctatgaagttgggcactaacagcattttatatgtattacttcatttataattacattatcctatgaagttgggcactaatagcatt

SEQ ID NO: 5142 - DNA, 131 bp, homo sapiens
attcactgcaatcaatgacccaccctaaaccaatcccctcttaattccaagccccccactcctgtactgcagcccaatcaacaagtaaacattcactgcaatcaatgacccaccctaaccaatcccctctg

SEQ ID NO: 5143 - DNA, 135 bp, homo sapiens
aacacacacagtggttttccaggtttaagagtgaatgatctcattttctctctctctctctcacacacgcacacatacacacacacataacacacacagtggttttccaggtttaacagtgaatgatctcatttt

SEQ ID NO: 5144 - DNA, 85 bp, homo sapiens
gcttcaattctcccatctatcactgggtggaattttggcgaggacaacttgtttattcatgagcttcaattctcccatctatcaa

SEQ ID NO: 5145 - DNA, 76 bp, homo sapiens
cactttctctaagaaagtgacaaaggtaacgtgtaatacaaaggtaaagcaacactttctctaagaaagtgacaaa

SEQ ID NO: 5146 - DNA, 87 bp, homo sapiens
tccaactgaagaagttagaaaaagaacaagagtaaagggctaaacaattagctaagattccaacttaagaagttagaaaaagaacaa

SEQ ID NO: 5147 - DNA, 101 bp, homo sapiens
ccttaggagtagaatctggcttaccaaatgaaatcctctccagccttattgtgaaggtacagcttccactcttccttaggagtagaatctggcttaccaaa

SEQ ID NO: 5148 - DNA, 84 bp, homo sapiens
cctatatatcttcagtgtgtaatcatattctggttcagtatactccaggtacatgagtctccctatttatcttcagtgtgtaat

SEQ ID NO: 5149 - DNA, 162 bp, homo sapiens
cctggccaacatgattaaaccctgtctctactaaaaatacaaaaaattagctggatgtggttggtggtgggcacctgtaatcccagctactcgggaggctgaggccaacctggccaacatgatgaaaccctgtctctactaaaaatacaaaaaattagctgg

SEQ ID NO: 5150 - DNA, 131 bp, homo sapiens
ataaagtttaattttataaatttaggtctagatgatttttgcgatgaccctaagtgtcacatgttcaccaactattttgttatcatatataaagtttagttttataaatttaggtctagatgatttttgcg

SEQ ID NO: 5151 - DNA, 89 bp, homo sapiens
ttttttttttgagatggagttttgctctcatctttcataatttctttcctttttcttttttttttttttgtgagatggagttttgctct

SEQ ID NO: 5152 - DNA, 93 bp, homo sapiens
ggtagctcctttctgcaggcaggtcatcgcaccgcctgcccaactctcagcagagaggggacccgcagtgggtagttcctttctgcaggcagg

SEQ ID NO: 5153 - DNA, 73 bp, homo sapiens
ttagaagagtcacctatgaaaaacccattgccaacattaggtagtttaacttagaagagtcatctatgaaaaa

SEQ ID NO: 5154 - DNA, 96 bp, homo sapiens
caaattttattgggggtttgaagaaattccctaggcttccacaaacaatcccacaaacaacttccacaaaccccaaattttatttggggtttgaag

SEQ ID NO: 5155 - DNA, 90 bp, homo sapiens
tatatatgcaaaacctaactttttgctatatatgcaacaccactatatgtgcaaaaccattgcactatatatatgcaaaacctaagtttt

SEQ ID NO: 5156 - DNA, 80 bp, homo sapiens
caagtctctaggaagttccaaactttccggcatcttcttgtcttctgagccctccaagtctctagaaagttccaaacttt

SEQ ID NO: 5157 - DNA, 75 bp, homo sapiens
aatgccatcagttaaggcaggaacagaccattttcatttcttttgtggtggaatgtcatcagttaaggcaggaac

SEQ ID NO: 5158 - DNA, 158 bp, homo sapiens
agctagatacagagtgtggacacaaaggttctccaaggccccaccagagtagctagatacagagtgtcgattggtgcattcacaaaccctgagctagacacagggtgctgattggggtatttacaaaccttgagctagatacagagtgccgattggtg

SEQ ID NO: 5159 - DNA, 95 bp, homo sapiens
cttactccctagtcctgcaatcctaggacccccaaccttactccctagccctgcaatcctaggacccccaaccttactccctagccctgcaatcc

SEQ ID NO: 5160 - DNA, 88 bp, homo sapiens
ctgggtttagaaagagggtgtctcaagagtgaacattccatgaggaagaaaggtgaaggtcctgggtttagaaagaaggtgtctcaag

SEQ ID NO: 5161 - DNA, 111 bp, homo sapiens
cccaggaggaggcagggaatggaaccaggcattagaggatgactatgtcccccattagactgggctgcactaactcacaccccaggaggaagcagggaatggaaccaggca

SEQ ID NO: 5162 - DNA, 91 bp, homo sapiens
ggggccgataatagctgcagaaacggacataggacaggatggctactcactgacaactcagaaccaaggggccgataatagctgcagaaac

SEQ ID NO: 5163 - DNA, 102 bp, homo sapiens
aattaattaaataccatgagatatcatatccaataatgtgcacaatctagataggaaaacaggtgcttaattaaattaattaaataccatgagatatgatat

SEQ ID NO: 5164 - DNA, 88 bp, homo sapiens
aacttagctaggcaaacagaccctaagaatcttaaaaacttagtgtggagccttttaaacttggctaggcaaacagaccctaagaatc

SEQ ID NO: 5165 - DNA, 81 bp, homo sapiens
tgtggcaaagtttggaacttcctagagatttagagggttcagaagatgggaggttgtgggaaagtttggaacttcctagag

SEQ ID NO: 5166 - DNA, 96 bp, homo sapiens
tgcataatggagggggagactttgatcgtggaactggggatggagtctacaaagagagagcagagctcatccctgcataatggagggggagaattt

SEQ ID NO: 5167 - DNA, 110 bp, homo sapiens
ccccttctgcttcttcccagctgcaaggctatcagggtggatgtggaagagtactgggctgcaggtcagggtgcattttccatccccttctgcttcttcccagctgcaag

SEQ ID NO: 5168 - DNA, 98 bp, homo sapiens
ctcagagtcaccaaaaccacccaattcaccatcgtggtctccaggaagtggctctcagctcaggcagaccaggccctcagagtcaacaaaaccaccca

SEQ ID NO: 5169 - DNA, 112 bp, homo sapiens
agtgtggtgataaagcagggagagaatgggggagcgggcaccacagtgtggtataaagcatggggagagtggggagtggggactgcagtgtggtataaagcagggagagaat

SEQ ID NO: 5170 - DNA, 88 bp, homo sapiens
gcactccagcctgggcgacagagccagactccacctcaaaaaaaaaaaaaaagattgtgccacggcactccagcctgggcaacagagc

SEQ ID NO: 5171 - DNA, 104 bp, homo sapiens
ccaacacctgcatttcagatctctggccttacagccacctacaggccaaagagaaaggcttcaaaccagcaccgccaacatctgcatttcagatctctggcctt

SEQ ID NO: 5172 - DNA, 93 bp, homo sapiens
cctggcagccacggcacaatctcccctggcacctccctggcagccagggcacaatctcacctggcacctccctggcagccagggcacaatctc

SEQ ID NO: 5173 - DNA, 95 bp, homo sapiens
gagtagcagggactacaggcatgtgcaacctccacctcccaggttcaagcgattctcctgcctcagcctcctgagtagcagggactacaggccat

SEQ ID NO: 5174 - DNA, 138 bp, homo sapiens
ggtggaagcggggcgggcggccgacccacgaggacactggcgggacaggggtgagcacaacccacgaggacactggcgggacaggggtgagcacctgtggtggaggcggggcgggcggccgacccacgaggacactgg

SEQ ID NO: 5175 - DNA, 74 bp, homo sapiens
cccagcaccgggttccttccccccaaacccatctcatctggactctgggcacccagcgccgggttccttccccc

SEQ ID NO: 5176 - DNA, 88 bp, homo sapiens
ggaagaggtgagggagcctgggtagggcaggcacattcctgggagcggctgaagctcagggaagaggtgagggaggctgggtagggca

SEQ ID NO: 5177 - DNA, 101 bp, homo sapiens
cccctgggaagtcctgccgtcctctttctgctgccacccagagcccgccctttccggagagcagttccctggggtgtccccctgggaagtcctgccctcct

SEQ ID NO: 5178 - DNA, 88 bp, homo sapiens
gctggctcaggtctctcgtcctcttccacgctgggcattccctggcgaaggggctgaggccgctggctcaggtctctcctcctcttcc

SEQ ID NO: 5179 - DNA, 100 bp, homo sapiens
ccctggtgcctcccagcagtgcccaccggggacaagagccctggcgcctcccagcagtgcccgccggggacaagagccctggcgcctcccagcagtgccc

SEQ ID NO: 5180 - DNA, 84 bp, homo sapiens
ggggcagagaaggttccagaaaggtggtagaggagccaggactggaagccagggcagggggcagagaaggttccggaaaggtgg

SEQ ID NO: 5181 - DNA, 95 bp, homo sapiens
gtccctgttttctgattggcggtcacagcactgtccacaccaccctgctgtcaatcactcagtagctgtccctgttttcagattggcggtcacag

SEQ ID NO: 5182 - DNA, 111 bp, homo sapiens
gtccatttgatggtgaagtacccagacacacaccccatgtgtgcacacacacatgtgcgcacacacacacacacgacaatcctggtccatttgttggtgaagtacccagac

SEQ ID NO: 5183 - DNA, 77 bp, homo sapiens
ttctagaagcctgggggctgactccagctgggtgccctcggcacctggacctttctggaagcctgggggctgactcc

SEQ ID NO: 5184 - DNA, 112 bp, homo sapiens
ggaagccctggcctttccaggattctccccaaaaggcacccggtgctgtggggctccccatcagagccagcccccccgggaagccctggcctttccaggattgtccccaaaa

SEQ ID NO: 5185 - DNA, 86 bp, homo sapiens
cactgggtgagagctgacatctccatacacacggtatcccctccatggtttagatcatccactgggtgagagctgacatctccata

SEQ ID NO: 5186 - DNA, 96 bp, homo sapiens
tcgctggatggcctctgtccatgccactcccagaagaggctgccagggccggggctgagctctgccagcgagtcgctggatggcctctgtccacgc

SEQ ID NO: 5187 - DNA, 108 bp, homo sapiens
tttacacagaggagcagagcacacatcaaagcacatggaaacactcgctgcctgcccgccctccagccagcagtcccagggtttacacagaggagcagagcgcacatc

SEQ ID NO: 5188 - DNA, 87 bp, homo sapiens
ccccagcagagaagggccccagggtgagggagacctgcccgcacagctgggaggacgctcactccccagcagagaagggccccacgg

SEQ ID NO: 5189 - DNA, 106 bp, homo sapiens
ccggagtcaggttcagcagggtcccgggccacctgcgtggccggagtcaggttcagcagggtccccggccacctgcgtgaccggagtcaggttcagcagggccccg

SEQ ID NO: 5190 - DNA, 98 bp, homo sapiens
aggtgcagcaggtgcgggtctgcatgaggcaagacggctcgggcaggcttctgagtgccagcctcctgctggggaggggcagcaggtgcgggtctgca

SEQ ID NO: 5191 - DNA, 114 bp, homo sapiens
cagaagctttgctagggagactgatcagccccggccgtgagtgactgccccgtctgcccgtccacccgcaaacagcagaagctttgctagggagactgatcagccccagccgtg

SEQ ID NO: 5192 - DNA, 84 bp, homo sapiens
ctagatccttcctccctccttcccaaacgcattgcggcttctgttcactggctgcctacctagatccttccttcctccttccca

SEQ ID NO: 5193 - DNA, 134 bp, homo sapiens
accaggggatatgcagactatcttcaggaccctggcttgatacccccaactgcacaattcataacctgaacctctccattctcaatgacaccaggggatatgcagactatcttcaggaccctggcttgctaccc

SEQ ID NO: 5194 - DNA, 108 bp, homo sapiens
cctatctcctgggagtagagtgtgactgggctggaggtggctctgaccgggaacccggccctgcccgccttctgtgcccactgacctatctcccgggagtagagtgtg

SEQ ID NO: 5195 - DNA, 85 bp, homo sapiens
tctccctcagtggctgggaaggaaggcctggcaccaggcaggtgacggccacaggccggtctccctcagaggctgggaaggaagg

SEQ ID NO: 5196 - DNA, 81 bp, homo sapiens
ggtgctgggggcacacctgtccccatgtgggcggctgcttctcccgcacacagactggtgctgggggcacaccagtcccca

SEQ ID NO: 5197 - DNA, 125 bp, homo sapiens
ataagtgtccatgaaatcttcacaatttatgttcagagattgcagtaaagacaggcataagaaattataaaagtattaatttggggaactaataaatgtccatgaaatcttcacaatttatgttc

SEQ ID NO: 5198 - DNA, 371 bp, homo sapiens
tccccacccctctgggctctccccacccctgtgggctctccccacaacctcagctgtggactcctccccgcccccacccccgtgggctccccccacccccacccctgtggacccctccaaccccccacccccgtgggctccccccactcccacccccgtggacccctccaaccccccacccccgtgggctctccctactcccacccccacccccacccccgtgggctctccccactcccaccccccacccccacccccatcccatgggctctccccactcccaccccccacccccacccccacccccgtgggctctccccactcccaccccccaccccccacccccgtgggctctccccacagatgccacc

SEQ ID NO: 5199 - DNA, 112 bp, homo sapiens
gtgaaagatgccagacaccaaaggacagatgctggatgattccactgacgggacacagctagaccctggaaacattacgctgcgtgaaagacgccagacaccaaaggacaga

SEQ ID NO: 5200 - DNA, 171 bp, homo sapiens
cctctgggttctggacacagcacgatgatgccagacacggcacgataccagacacggcaggatgatgccagacccagcacgatgccaggcacggcacgataccagacccagcacgataccaggcccggcacgataccagacacggcaggatgatgccagccccagcacgat

SEQ ID NO: 5201 - DNA, 109 bp, homo sapiens
ctgccacaggacagggcggggctcggctgggggggtacaaaagtgaagcaacacatagtccccgcgtcaggaagctggattctgccacaggacagggcagggctcggct

SEQ ID NO: 5202 - DNA, 79 bp, homo sapiens
cacttcagcccctccccctgccccccttggccaggacacaccagggggacagccgcacttcagccccctccccctgccc

SEQ ID NO: 5203 - DNA, 114 bp, homo sapiens
ctggagagaagccactactgacccaggggtccttgcacctccacagctgggagggcagcaagtcacctcctgggggtctgcaggctggagagaagccactaccgacccaggggt

SEQ ID NO: 5204 - DNA, 98 bp, homo sapiens
tgctttgtgagtggaaacgtggccagagtgcggcgggtgctttgtgagtggaaatgtggccagagtgcggcggatgctttgtgagtggaaacgtggcc

SEQ ID NO: 5205 - DNA, 111 bp, homo sapiens
ctacggtggccagcgtccaaggcagcacaacgcttcctgctctgcactgctacctgatgtggaatgagcacctcagccaatctacggtggccagcatccaaggcagcacaa

SEQ ID NO: 5206 - DNA, 94 bp, homo sapiens
atgtttgggtaaagagaaacataaatctagcgctgctgctctgttactctttgctacaatgacatgtttgggtaaagagaaacataaatttagc

SEQ ID NO: 5207 - DNA, 109 bp, homo sapiens
cggctcacctcatcattgctctgcagccatgagccacccgggggctcccggtgcctgaggccctggctccccctccgctctgcggctcacctcgtcattgctctgcagc

SEQ ID NO: 5208 - DNA, 92 bp, homo sapiens
gagcacggccgtgagacctccagggctccaagagcagacccgcaggctccagcggggctgaggcggagcacggctgtgagacctccagggct

SEQ ID NO: 5209 - DNA, 194 bp, homo sapiens
gcactgagacgcacacaaaccctggtgcggcctccagccctcaggctgacccggagtgaccacttcacatcccgcactgagacgcacacaaaccctggtacggcctccagccctcaggctggcccggagtgaccacttcacatcccgcactgagacgcacacaaaccctggggcggcctccagccctcaggctg

SEQ ID NO: 5210 - DNA, 109 bp, homo sapiens
agcctgggcctccagaactgattgacttccttcaagtcagttcacgactccccagtccccgacgtgagtcatagcccgggcctccagaactgattgacttccttcaagt

SEQ ID NO: 5211 - DNA, 134 bp, homo sapiens
caccaattggcactctgtatctagctcaaggtttgtaaacacaccaatcagcaccctgtgtctagctcagggtttgtgagtgcaccaattgacactctgtatctagctcaccaattggcactctgtatctagct

SEQ ID NO: 5212 - DNA, 176 bp, homo sapiens
gctttcttttcttttcttttctttttttctttctcccttctgcttccccttctccttccttccttccttctttccttccttccttccttccttcctttctttctttctttctttctttctttctttctttctttctttctttctttctttctttctttctttctttctttctttct

SEQ ID NO: 5213 - DNA, 181 bp, homo sapiens
ctgcagagaggagctaccctctctgatgagaactgaggacttgcttaacagagaggagctaccctctctgctgggaggtgaacactccggacgacctgcctaacagagaggagctaccctctctgacaggagctgaacattcatcaggacaccctgagacggagagaagatgcccactatg

SEQ ID NO: 5214 - DNA, 286 bp, homo sapiens
tgtctagctaaaagattgtaaatgcaccaatcagcactctgtgtctagctaaaggtttgtaaacacaccaatcaacactctgtaaaaatgcaccaatcagcactctctgtctagctaaaggtttgtaaatgcactaatcagagctctgtgtctagctaattgggtagggacttggagaacttttctgtctagccaaaggtttatatatgcaccaatcagcactctgtgtctagctcattgggtgtggacttggagaacttttgtgccattctaaacgtttgtaaac

SEQ ID NO: 5215 - DNA, 140 bp, homo sapiens
taggtataacagtgtgtgtgtgtgtgtgtgtgtgtgtgtgtgtgtgtgtgtgtgtgtgtgtgtaagctcctcaccctgctaggtataacagtgtgtgtgtgtgtgtgtgtgtgtgtgtgtgtgtgtgtgtgtgtgtgtat

SEQ ID NO: 5216 - DNA, 97 bp, homo sapiens
ccagaagcagaggttgcagtgagccaagatcccagctactagggaggctgagacgtgagaatcgcttgaaccccagaagcagaggtttcagtgagcc

SEQ ID NO: 5217 - DNA, 88 bp, homo sapiens
tgctgctagctttctgttattattcattataacaacacagcacattctcttgaaaacaatgctgctagctttctgttattattcatta

SEQ ID NO: 5218 - DNA, 133 bp, homo sapiens
actagcagtattggtaaacaaaaatatttgcttagataaaagactgtatatcataattagtatataaagctgaggactgtatgtacatatttactagcagtattggtaaacaaaaatatttgcttagataaaa

SEQ ID NO: 5219 - DNA, 104 bp, homo sapiens
agatcatgccactgcactccagcctgaggcaggagaatcacttgaaccaggaggtggaggttgcagtgcgccaagatcatgccactgcactccagcctgggcaa

SEQ ID NO: 5220 - DNA, 78 bp, homo sapiens
ttctgaagttattctatattttcaccttctgtttcccaaaatgaaaaacaaaaacttcttaagttattctatattttc

SEQ ID NO: 5221 - DNA, 92 bp, homo sapiens
agaaaaatataagtatttcaatactatgattcagaatcttaaaaaaaatttcaaaaatactgcttccagaaaaatgtaagtatttcaatact

SEQ ID NO: 5222 - DNA, 103 bp, homo sapiens
aaagaggacaggagggaaggggaggagagaggagaggagaggagggaaggggaggggaggggagggaagggaaagggaggggaggggagaggaggggagggga

SEQ ID NO: 5223 - DNA, 105 bp, homo sapiens
agagagaagaatgcctgggagcaagacaaagactctgtctttgggtgagattgtgctcagtatcctggctggggagagaagagagaagaatgcctgggagcgaga

SEQ ID NO: 5224 - DNA, 129 bp, homo sapiens
ctaaattctatccagtgcctctttactgagaacctttacagtgccttgtttgaataacgggttcagtgatggagaagagcctctttactgaggctaaattctattcagtgcctctttactgagaacctt

SEQ ID NO: 5225 - DNA, 125 bp, homo sapiens
gaacataaattgtgaagatttcatggacatttattagttccccaaattaatagttttataatttcttatgcctgcctttactgcaatctctgaacataaattgtgaagatttcatggacatttat

SEQ ID NO: 5226 - DNA, 87 bp, homo sapiens
tttggttaggattcattgctagataattattcattgctagataattcattgctagataatttggttaggattcattgctagataatt

SEQ ID NO: 5227 - DNA, 86 bp, homo sapiens
tgttgattacctatccaagatccaccatcttagtggcagtagcttagtggcagtagttgttgattacctatccaagatccaccatc

SEQ ID NO: 5228 - DNA, 97 bp, homo sapiens
atcagtgaggaccagagtgggcaggagacacagacatggatggacagacacacacacacaccacacaatcagtgaggaccagagtggacaggagaca

SEQ ID NO: 5229 - DNA, 143 bp, homo sapiens
gcttcattattctcgaaaatctagctctttaattgacttcattattcttcattattattcactaattattgacttcattattcttcactgttctttaattggcttcattattctcgaaaatctagctctttaattgcttcata

SEQ ID NO: 5230 - DNA, 76 bp, homo sapiens
gtatacccaaaaacctgaaaacccagggccctgggttacagtatttccacgtcgtatacccaaaaacctgaaaacc

SEQ ID NO: 5231 - DNA, 98 bp, homo sapiens
ttccgtgttgttctgtgaggtagatgaggtctgacagtgtataatgagctcctaaatatgactcagtcgatctgttccgtgttgttctgtgaggtaga

SEQ ID NO: 5232 - DNA, 130 bp, homo sapiens
tatcactcatacttgctgtgagagtgctttggtacaggtatgtctacatgtgagaggtcaaatgggaagggagggcatatatctatatgtctgtatcactcatacctgctgtgagagtgctttggtacag

SEQ ID NO: 5233 - DNA, 120 bp, homo sapiens
atgtccatgaaatcttcacaatttatgttcagagttgcagtaaagacaggtgtaagaaattataaaagtattaatttggggaattaatagatgtccatgaaatcttcacaatttatgttc

SEQ ID NO: 5234 - DNA, 97 bp, homo sapiens
agtgatatgtttatgatatgtttatgttctatgatatgatatgtttatgttctatatgtttatgttcatatgatatgatatgtttatgttctataat

SEQ ID NO: 5235 - DNA, 109 bp, homo sapiens
aatacattgttattaactgtagtcaacaacttttttatggtgaaaatattcaaaatctactcttttagcaattttcaagtttacaatacattgttattaactgtgtcac

SEQ ID NO: 5236 - DNA, 115 bp, homo sapiens
ttctgataatgtactttgtgatattcccatccttgtgaatgtattttgtaacattcctccccgctcttgtgacaatacaccctccccgcccttgtgaatgtactttgtaacattc

SEQ ID NO: 5237 - DNA, 213 bp, homo sapiens
ttttctttctttctttctttctttcttcctttctttctttctttctttctttcttccttccttccttcctttcctttctttcttccttccttctttccttccttccttccttccttccttccttctttctttctttctttctttctttctttctttctttctttctttctttctttctctctcttcctttcttcctttctgtcttcttgcttt

SEQ ID NO: 5238 - DNA, 79 bp, homo sapiens
aagtttggaacttcctagagacttggagggctcagaagacaggaaaatgtggcgaagtttggaatttcctagagacttg

SEQ ID NO: 5239 - DNA, 82 bp, homo sapiens
attaagttttttattttcttatttttcttattttcttagtagctcagagacacatattaagttttttattttcttatttttc

SEQ ID NO: 5240 - DNA, 69 bp, homo sapiens
gaatactaaaataagtgaaagacttaagtctttttttaaaagtgaatactaaaataagtgaaagaatac

SEQ ID NO: 5241 - DNA, 75 bp, homo sapiens
ctagctgagaaatattgaataaaatattttctcggctagagaaatattcctctagctgagaaatattgaataaaa

SEQ ID NO: 5242 - DNA, 236 bp, homo sapiens
ttgtaaatacaccaatcagcactctgtgtgtagctcaaggtttgtaaacacaccaatcagcaccctgtgtctagctcaaggtttgtaaatgcaccaatcagcactctgtatctagctaatccggtggggacttggagaacttttgtgtctagctcagggattgtaaacacaccaatcagcaccctgtcaaaacggaccaatcagctctctgtaaaacagaccaatcagctctctgt

SEQ ID NO: 5243 - DNA, 144 bp, homo sapiens
aataaacagccttgttgctcacacaaagcctgtttagtggtctcttcgcacggacgcgtgtgatcttttcggactcagcccacctgcacccaggtgcaataaacagccttgttgctcacacaaagcctgtttagtggtctcttc

SEQ ID NO: 5244 - DNA, 76 bp, homo sapiens
tacaaagtaccttcttaagggcgtaggggggaggcaggggaggggaagaatattacaaagtaccttcttaagggtg

SEQ ID NO: 5245 - DNA, 133 bp, homo sapiens
ggatttactatgtgtacaattgcttagtctatgtatactgaaaatttacacattataaactgacttatttgttttaagatattttttgattccttcggatttactgtgtgtacaattgcttagtctatgtata

SEQ ID NO: 5246 - DNA, 101 bp, homo sapiens
tctcatttatgattttgatctactactcttcttagagaatgaagaatgggttattgtaagctacggactggcatactctcatttgtgattttgatctacta

SEQ ID NO: 5247 - DNA, 98 bp, homo sapiens
tgagacaatgaatttctgttgtttaagtaacccctgccaacacattgatcttagacctctagcatccagaaccatgagacaataaatttctgttgttt

SEQ ID NO: 5248 - DNA, 85 bp, homo sapiens
tatttgctaataacacatgcaaagatgtatgtgcacacactcaaaatctctaatttatatatatttgctagtaacacatgcaaag

SEQ ID NO: 5249 - DNA, 96 bp, homo sapiens
aaaactccttatctgaggaatttagaagggaccaaaggttacctggtgaccatttaataggccattcggaggcaaaactccttatctggggaattt

SEQ ID NO: 5250 - DNA, 106 bp, homo sapiens
actgcagctgcccaaaccatggctgcagacctggtcctcccaatccacagatcaggcaggagccctgccccactggacacaactgcagctgcccaaaccatggctg

SEQ ID NO: 5251 - DNA, 91 bp, homo sapiens
actatcagactctcccaaaaataaaagttaaaaatcaaatgagggtatcagtaatggaagaaaactatcagactctcccaaaaagaaaagt

SEQ ID NO: 5252 - DNA, 96 bp, homo sapiens
ttaccattctccctttaccactctttctagtcaacttttctcttttctcctaaatgacttaccattctcccattaccactctttctagtcaacttt

SEQ ID NO: 5253 - DNA, 110 bp, homo sapiens
tacaatacttttcttttttttttttttttttttttttattcttctttgttttatttataatttttttttttacaattctttttttttttttttttttttttttttttatt

SEQ ID NO: 5254 - DNA, 79 bp, homo sapiens
tattaaacagagcacagatgttctatttactgtattaatactattaatactaattatattaaatagagcacagatgttc

SEQ ID NO: 5255 - DNA, 81 bp, homo sapiens
ccagcacccatgtgcactatccaggggcctgagaacgggctcactccacccactacaaccagcacccaagtgcactatcca

SEQ ID NO: 5256 - DNA, 121 bp, homo sapiens
ctaaataaggtttatagattagtctagaaactaataaggtttatagattagtttatagatagattataaagtttatagatagattaagagctaaataaggtttacagattagtctagaaac

SEQ ID NO: 5257 - DNA, 111 bp, homo sapiens
gtgacagagtgaaaccctgtctcaaatatatacatacatacatacatacatactaacgacacagtatttattatccagcctgagtgacagagtgaaaccctgtttcaaata

SEQ ID NO: 5258 - DNA, 77 bp, homo sapiens
tgtaaagatacatacacacaaatactacaattactctcataatgaggatattgtaaagatacatacacacaaatact

SEQ ID NO: 5259 - DNA, 86 bp, homo sapiens
atctgtgagtagataatagtatgatagaatctgtatttactaatgattctagtagttaagtgtatctgtgagtagataatagtgat

SEQ ID NO: 5260 - DNA, 95 bp, homo sapiens
agcatgagaactgcccccatgatccaatcatggggaacacatgagaacacactagcatgagatctcactagcatgagaactgcccccgtgatcca

SEQ ID NO: 5261 - DNA, 103 bp, homo sapiens
ctgatattatataccggtatatattatataccggtatatattggtatatactgatattatactggtatatactgatattatatactggtatatattatatacc

SEQ ID NO: 5262 - DNA, 75 bp, homo sapiens
ttttttaatcaaaagattgaaataatgcaatagttattttagaaatttgagtttttttcatcaaaagattgaaat

SEQ ID NO: 5263 - DNA, 95 bp, homo sapiens
attcaccaccagactgggaagcaagagcctgggctccagagtcagacaccgcactcaccagactatggagaattcagcaccagactgggaagcaa

SEQ ID NO: 5264 - DNA, 77 bp, homo sapiens
tttcccacatcttcctgtcttctgagccccccaagtatctaggaagttccaacctttcccacattttcctgtcttct

SEQ ID NO: 5265 - DNA, 102 bp, homo sapiens
ggcattttccccattgtcttggctattaacatttgggaagggctgctgtgaaggtctctgaaatgccttcaagggcattttccccattgtgttggctattaa

SEQ ID NO: 5266 - DNA, 80 bp, homo sapiens
agccaatgatagtggttttcaagcctataccctgtgtccctttttactgtgtaaaaaagccaatgatagtggttttcaag

SEQ ID NO: 5267 - DNA, 116 bp, homo sapiens
aaagaacttactcatgtaaccaaataccacctgtaccccataacttatggaaaaataaaataataaatttaaaaaaaaattttaaaaaagaacttactcatgtaaccaaataccac

SEQ ID NO: 5268 - DNA, 91 bp, homo sapiens
atctcaagtctctggagagagacttgagatccaaatagtccccagtagtcatctcaagtcttaatcatctcaagcctctggagagagactt

SEQ ID NO: 5269 - DNA, 125 bp, homo sapiens
gaacataaattgtgaagatttcatggacatttattagatccccaaattaatacttttataatttcttacgcctgtctttactgtaatctgtgaacataaattgtgaagatttcatggacacttat

SEQ ID NO: 5270 - DNA, 140 bp, homo sapiens
cctgctttaccacctgccttccccatccttttgcatgcttgcctgcctgcctgcctgcctgcctgcctgccttccttccttccttccttccttccttccttccttccttccttccttccttccttccttccttcctctct

SEQ ID NO: 5271 - DNA, 139 bp, homo sapiens
tcttttacttctttggttaagtttatatttaggtattttattttatgtagaggtatatcattttattttattttattttattttatgtagagatcttttacttctttggttaagtttatacttaggtattttattttat

SEQ ID NO: 5272 - DNA, 83 bp, homo sapiens
tttgggtgagattactcctcatttttttattgtggagtaatcacaataaatctcattttgggtgagattactcttcatttttt

SEQ ID NO: 5273 - DNA, 111 bp, homo sapiens
ttttgctctccacaacttttaggccctaagtacatacaagcatgtatgaaaaaacaaatgcacttattttcacacattttgctcttcacaacttttaggccctaagtacat

SEQ ID NO: 5274 - DNA, 116 bp, homo sapiens
taccaccatcattcttcacagaaatataaaagtatcatatttctgccaaaagcaatccacaaattcaatgcagtttccttcagaataccaccatcattgttcacagaaatataaaa

SEQ ID NO: 5275 - DNA, 110 bp, homo sapiens
ttgcctactcatttaattacctgtgtgcccttgtcaaaatcatttaattttgactactcacttaattaccttgcctactcatttaattacctgtgtgcccttgtcaaaat

SEQ ID NO: 5276 - DNA, 121 bp, homo sapiens
tgtctagctaaaggattgtaaatgcaccaatcagcactctgtgtctagctaattgggtaagggacttggagaacttttgtgtctaactaaaggattgtaaatgcaccaatcagcactctgt

SEQ ID NO: 5277 - DNA, 145 bp, homo sapiens
caaatccctgagcttgatgtgtagggaagggaggggcctgaataatccctgagaagtagtagaatagcaaatttgccagtccttggtggggacaaatccctgagcttgatgtgtagggaagggagggggcctgaataatccctga

SEQ ID NO: 5278 - DNA, 111 bp, homo sapiens
taacaccggaacagaaaaccaaacaccactttcatgtcctttgcagggacacggatgaagctggaaaccattattctcagcaaattaacacaggaacagaaaaccaaacac

SEQ ID NO: 5279 - DNA, 107 bp, homo sapiens
ttagctagacacagagtgctgattggtgcatttacaatcctttagctagatagaatagttctccaagtcccctacccaattagctagacacagagcactgattggtg

SEQ ID NO: 5280 - DNA, 167 bp, homo sapiens
ttttcttcttgctttcttctcttttctttcccttccttccttccttccttccttccttccttccttccttccttccttccttccttccttccttccttctttctttctccttttcttttcttttcttttcttttcttttcttttcttttcttttcttttcttttctt

SEQ ID NO: 5281 - DNA, 127 bp, homo sapiens
tgataaatgtccatgaaatcttcacaatgtatgttcagagactgcagtaaagacaggcataagaaattataaaagtattaatttggggaactgataaatgtccatgaaatcttcacaatttatgttc

SEQ ID NO: 5282 - DNA, 75 bp, homo sapiens
agcttcacacctctggcacctctgacacctctagcactttcacacctccggcaccttcacacctctggcacctct

SEQ ID NO: 5283 - DNA, 80 bp, homo sapiens
atattatgaacatcactgtgctcactaaacgctagaaaatctagatgaaatggatattatgaacatcactatgctcacta

SEQ ID NO: 5284 - DNA, 81 bp, homo sapiens
tctaggaagttccaaactttcccacatcttcctattttctgagccctccaagtttctaggaagttccaaactgtcccacat

SEQ ID NO: 5285 - DNA, 96 bp, homo sapiens
aaaactgataatattggaatgcaagaggtaatgtaaccgaacggtacagacagtagaaaagatggttagaaaagactgataatattggaatgcaag

SEQ ID NO: 5286 - DNA, 109 bp, homo sapiens
cttgtctccctctttgtcctcaaaacttcagcccccatccgccccccgccccccgaggagcctagaggttgctctttttcttgtctccatctttgtcctcaaaacttca

SEQ ID NO: 5287 - DNA, 101 bp, homo sapiens
tggtagtggaagacaaaggacatataatatatatgtcatataatagacacacctcgcccttccctacccaccctggtagtggaagacaaaggacatataat

SEQ ID NO: 5288 - DNA, 93 bp, homo sapiens
ccctttacgggtgtcgggctggaggacggtcagctctttcccttcccacgaggccatattccctttacgggtgtcgggctgggggacggtcag

SEQ ID NO: 5289 - DNA, 151 bp, homo sapiens
cctctcctactagagatttctcgccctccgtcctttcagaagctcactgaggctctgaggctcaatccctcatattagagatttcttgcctatcgatttccataggcattgttaaggctcagtccctcgtattagagatttcttgcctatc

SEQ ID NO: 5290 - DNA, 108 bp, homo sapiens; identical to SEQ ID NO: 435

SEQ ID NO: 5291 - DNA, 108 bp, homo sapiens
cctctgcccggccgccaccccgtctgggaagtgaggagcgtctctgcctggccacccatcgtctgggaagtgaggagcccctctgcccggccgccaccccgtctggga

SEQ ID NO: 5292 - DNA, 114 bp, homo sapiens
gtgtatatcagctgatatgatgtcactctgaaccttgaacggatattgagataagtatttttactttataaagcatgggtgtatatcagctgatatgatatcactctgaacctt

SEQ ID NO: 5293 - DNA, 78 bp, homo sapiens
ttgtacaatagatctcttgatctttagcttattcctcctatctaactgaataagttgtacaatagatctcttgaactt

SEQ ID NO: 5294 - DNA, 88 bp, homo sapiens
agattgaggccaacagtctcttatgttcagtggtgttctggtgatctctatgtatttggtattgagattgaggccaacagtcccttat

SEQ ID NO: 5295 - DNA, 109 bp, homo sapiens
tatgtaaaaatactaactagaactcaactggacttcaattatggcggtatgtcatcgaaatacatcctccttcataaagtatgtaaaaatactaactagaacttaactg

SEQ ID NO: 5296 - DNA, 89 bp, homo sapiens
ttttaatttaaacttgctggctcactaaaagacttgcttcatctatggttataaaacttttaatttaaacttgctggctcactataaag

SEQ ID NO: 5297 - DNA, 92 bp, homo sapiens
agtgataataaaattaggtattttaggtaaaaaaatgtatttattaagtgcttaatgtatttattaagtgataagaaaattaggtattttag

SEQ ID NO: 5298 - DNA, 90 bp, homo sapiens
cacacatgcatgttcacttgcatcgtgcacatgcacacacacgtgtgcatggtatatacatgcacacatgcatgttcacttgcatgcgtg

SEQ ID NO: 5299 - DNA, 82 bp, homo sapiens
cagttgtctaacttttcctataaaaagtgatacatttcaatatgtcatttttctatcagttgcctaacttttcctataaaaa

SEQ ID NO: 5300 - DNA, 88 bp, homo sapiens
tataaaacactttattaaagggatatcaattagtattatataatgtatctaggtccaaaaagttgtatgaaacactttattaaaggga

SEQ ID NO: 5301 - DNA, 80 bp, homo sapiens
ctgtgtgcccagagcctatgtgtcaggcttatgtgtcaagcctgtgttgggcctttgtgcccaaaacctatgtatcaggc

SEQ ID NO: 5302 - DNA, 124 bp, homo sapiens
ataaatgtccatggaatcttcacaatttatgttcagagattgtagtaaagacaggtataagaaattataaaagtattaatttggggaatgaataaatgtccatgaaatcttcacaatttatgtt

SEQ ID NO: 5303 - DNA, 186 bp, homo sapiens
agctggacactcactgggacaacctgcctgcagaaggagctacgcaccacgagtctcctctccactgagagctggacactcactggggcaacctgcctggggaaaggagccccaggctcttttccacttttcatcatgggtctcttctccactaagaactggacacttgttgggatgaactgcctg

SEQ ID NO: 5304 - DNA, 80 bp, homo sapiens
agccaactgcattcgtggttaatttctttttctcaatggaaatactctcactcaccagccaactgcattcatggttaatt

SEQ ID NO: 5305 - DNA, 121 bp, homo sapiens
gttgcagttgtgcctgggagggcagggctcccacctgctcccagcctccaagagcacagggaggcccaggtctgcagctgtgcctgggtggttgcagctgtgcctgggagggcagggctcc

SEQ ID NO: 5306 - DNA, 147 bp, homo sapiens
ataatttttaatatttaagaattatttacttatgtatgcttacatagagaacatactatatatatggtaaatatactgaccatgaaaagtctaataatttttaatatttaagagttatttacttatgtatgcttacatagagaacat

SEQ ID NO: 5307 - DNA, 100 bp, homo sapiens
tattgatataaatcttacatatcttgcacgagattcaagaaccctctcttggggtctggatccagacccctttcctgtattgatataaatcttacatatc

SEQ ID NO: 5308 - DNA, 86 bp, homo sapiens
cctcttagaatgtgctataacaccatgaggtacataccaccatccctatccctacccacaccctcttagaatgtgctataacccag

SEQ ID NO: 5309 - DNA, 84 bp, homo sapiens
tgagctgagatcatgccactatattccagcccaagtgacagtgaggaatttgaggctgcagtgagctaagatcatgccactata

SEQ ID NO: 5310 - DNA, 98 bp, homo sapiens
atgaatgctcacctggctttgcattcctcacctgcggatgaacgctcatctgcctttgcattccccactggaggatgaacgctcacctggctttgcat

SEQ ID NO: 5311 - DNA, 82 bp, homo sapiens
ggtcaggccgccctgaaccctccaggcacactggccctaaatgtgtctgcttcctgaagggtcaggctgccctgaaccctcc

SEQ ID NO: 5312 - DNA, 77 bp, homo sapiens
catgactcagcaattccacttctagatttacatcaggagaggctcttgcatacatgactcagcaattccactcctag

SEQ ID NO: 5313 - DNA, 86 bp, homo sapiens
cccaggctggagtgcagtggcacaatctttttttttttttttagacggagtcttgctctgtcacccaggctggagttcagtggcac

SEQ ID NO: 5314 - DNA, 125 bp, homo sapiens
cactctgtcgcccaggctggagtatttatttatttattttgagatggagtctcactctgtcgcccaggctggagtgcactggcacgatcttggctcactgcaacctctgccgcccaggttcaagc

SEQ ID NO: 5315 - DNA, 92 bp, homo sapiens
gactggatgggaaaagaggctataaaaatacttcagtgacaatatgtaaatacagaaaccccgactggatgggaaagaggctataaaaatac

SEQ ID NO: 5316 - DNA, 100 bp, homo sapiens
ggtttcaccgtgttatccaggatggtctcgatctcctggctaattttttgtagttttagtagagatgaggtttcaccgtgttagccaggatggtctcgat

SEQ ID NO: 5317 - DNA, 93 bp, homo sapiens
gtacacagtaataccatggaaagtaccctcaatgggtacacagtaataccatggaaagtaccctcaatgggtacacagtaataccatggaaag

SEQ ID NO: 5318 - DNA, 124 bp, homo sapiens
aaacctattgacatactagatgtgacagtcagtctgtcactttgcagcctttgctaatgtttatgatggcatttttactgtgcaagccacgtaaacctattgacacactagatgtgacagtcag

SEQ ID NO: 5319 - DNA, 98 bp, homo sapiens
ggaccctgggttactctgcacatttctgccttttgccgctagaggatgcactcccagagggcatggaccctgggttactctacacatttctgcctttt

SEQ ID NO: 5320 - DNA, 125 bp, homo sapiens
tttgagatttgtaggactatttgtgctggtaggctaatttctagtgtctctctctctctctatgtatatatacatatatatttgaggtttgtaggactatttgtgctggtaggctaatttctagt

SEQ ID NO: 5321 - DNA, 101 bp, homo sapiens
tgagtgagggcctactaggtaccaggcccactgcagacagtcgcaatttcatccatccattcatctatcagatactgattgagggcctactaggtaccagg

SEQ ID NO: 5322 - DNA, 72 bp, homo sapiens
tgatcataatagaattagaaatcaataacaaaaaatctggaaagttctctgatcacaatagaattagaaatc

SEQ ID NO: 5323 - DNA, 87 bp, homo sapiens
ttacaattatctcaaaaaaatttcagtgaaatttttcagtgataattgtaatttaattacaattatctcaaaaaaatttcagtgaaa

SEQ ID NO: 5324 - DNA, 73 bp, homo sapiens
gacactctgtatctagctactctggtggggacttggagaaccttcgtgtggacactctgtatctagctaatct

SEQ ID NO: 5325 - DNA, 86 bp, homo sapiens
ctccgacctctcagaccgagtgagcccagctaagccgttaggcgcgcgcctgaacctcagcgctccgaactctcagaccgagtgag

SEQ ID NO: 5326 - DNA, 90 bp, homo sapiens
cttgcccctagcttctgcagcctcgattgtacattgtgtgaatctcccgtctttccacctcactgcccttgcccctagcttttgcagcct

SEQ ID NO: 5327 - DNA, 81 bp, homo sapiens
ttcattgacctattggttgttcaagagcatgttgcttaattcttttaatttccatttcttcattgacctattggtggttca

SEQ ID NO: 5328 - DNA, 108 bp, homo sapiens
acctgtaatcccagcactttgggaggccgaggcaggcagatcatgaggtcaggagatcgagaccatcctggccaacacggtgaaacctgtaatcccagcactttggac

SEQ ID NO: 5329 - DNA, 304 bp, homo sapiens
aatttaatttttgatgtatctgtagtatttgtgtattatgtattttaatttgtgatatatctgtagtatttgtgatgtatctgtagtactgccacctccaaatttaatttgtgatgtatccgtagtatttgtgatgtatctgtagtactaccacctccaaatttaatttgtgatgtatctgtagtattggagtagtctaccacctccaaatttaatttgtgatgtatctgtagtatctatctgtttacagtagaagaaacaagtctaccacctccgaatttaaattgtgatgtatctgtagtat

SEQ ID NO: 5330 - DNA, 106 bp, homo sapiens
gactacgggcgcccgccaccacgcccggctaagagagtgtgtgtgtgtgtgtgtgtgtgtgtgtgtgtgagagagagactacaggcgcccgccaccacgcccggct

SEQ ID NO: 5331 - DNA, 116 bp, homo sapiens
gactacgggcgcccgccaccacgcccggctaagagagtgtgtgtgtgtgtgtgtgtgtgtgtgtgtgtgtgtgtgtgtgtgtgagagactacaggcgcccgccaccacgcccggct

SEQ ID NO: 5332 - DNA, 81 bp, homo sapiens
tgaaccaccaataggtcaatgaagaaatggaaattaaaagaattaagcaacatgctcttgaacaaccaataggtcaatgaa

SEQ ID NO: 5333 - DNA, 122 bp, homo sapiens
aataactcttagatctgtctttgtgaggctattttctagatcctcccctgcctctttctttacatcttctttaaaacaaataactcttagatctgtctttgtgaggctattttctagatcct

SEQ ID NO: 5334 - DNA, 77 bp, homo sapiens
tcacaagcaactgcagtgctattaaaacaaacctagaatcccaggcactcatcacaagcaactgcagtgctattaaa

SEQ ID NO: 5335 - DNA, 79 bp, homo sapiens
acacatgcatccccattaccttttaatggaacaaggcaagtcctttaatggggacacatgcatccctattaccttttaa

SEQ ID NO: 5336 - DNA, 100 bp, homo sapiens
gccaagacactgattccctgtgaagcagggcagtgcttcagctctcatgcagtggggggtgtgactgcttagactggccaagacactgattccctggaaa

SEQ ID NO: 5337 - DNA, 99 bp, homo sapiens
ttccagggaatcagtgtcttggccagtctaagcagtcacaccccccactgcacgagagctgaagcactgccctgcttcacagggaatcagtgtcttggc

SEQ ID NO: 5338 - DNA, 99 bp, homo sapiens
ttccagggaatcagtgtcttggccagtctaagcagtcacaccccccactgcatgagagctgaagcactgccctgcttcacagggaatcagtgtcttggc

SEQ ID NO: 5339 - DNA, 100 bp, homo sapiens; identical to SEQ ID NO: 5336

SEQ ID NO: 5340 - DNA, 108 bp, homo sapiens
ccaaagtgctgggattacaggtttcactgtgttggccaggatggtctcgatctcctgacctcatgatctgcctgcctcggcctcccaaagtgctgggattacaggtgt

SEQ ID NO: 5341 - DNA, 86 bp, homo sapiens
tgaaccaccaataggtcaatgaagaaatgaaaattaaaagaattaagcaacatgctcttgaacaaccaataggtcaatgaagaaat

SEQ ID NO: 5342 - DNA, 80 bp, homo sapiens
atgtatcgcatgatactgcaggaatccagggacacgtgaaacgcccagtgctgttttatgtattgcatgatactgcagga

SEQ ID NO: 5343 - DNA, 83 bp, homo sapiens
ctataaaatactaggtattattcattctttcacactattttttgtacccgttgtgctataaaatactaggtattattcattct

SEQ ID NO: 5344 - DNA, 137 bp, homo sapiens
tctttaacgtttcctcttaaatactggagacagcttcgaggaggagataactggatgtgtcttagtccatttgatggagggatgtgacggggctgcgtctttaacgtttcctcttaaataccggagacagcttcgag

SEQ ID NO: 5345 - DNA, 110 bp, homo sapiens
ggatcacttgaggtcaggagttcgagaccaaagccaggctcacgcctgtaatcccagcactttgggaagctgaggcaggaggatcacctgaggtcaggagttcgagacca

SEQ ID NO: 5346 - DNA, 78 bp, homo sapiens
atataataatattacagagtcaacattttgactctgtaatattaataattatccatataataatattacagagtcaac

SEQ ID NO: 5347 - DNA, 81 bp, homo sapiens
tattagagatttcttgcctatccttctctggaggcttattgagactcaatccctcatattagagatttcttgcctatcctt

SEQ ID NO: 5348 - DNA, 90 bp, homo sapiens
aactaaatacaatggtagagagaggaagcgagagagatggggagaaaaagagagagagagatgaactaaagacaatggtagagagaggaa

SEQ ID NO: 5349 - DNA, 73 bp, homo sapiens
ccttcctggaaactccttcctccctcactccctctctcccttcctgccttccttcctggaaactccttccttc

SEQ ID NO: 5350 - DNA, 87 bp, homo sapiens
ggcaaaagacatgaacaggtacttctcaaaagaagatacacaagtgaccatgaaactaggcaaaagacatgaacagatacttctcaa

SEQ ID NO: 5351 - DNA, 126 bp, homo sapiens
aggtgaagaaactgcacagagactgcactactacattcctgcagcctaagctactgaggtgcttgcaaatattgctaatgtagattacaggtgatgaaactgcacagagactgcactactacattc

SEQ ID NO: 5352 - DNA, 74 bp, homo sapiens
ctgtatctagctactctggtggggccttggagaacctttgtatagacactctgtatctagctaatctggtgggg

SEQ ID NO: 5353 - DNA, 85 bp, homo sapiens
tagatttccttctgctaattctttttcttaatctaacttctaaattcttaatctaatttctttagatttctttctgctaattctt

SEQ ID NO: 5354 - DNA, 82 bp, homo sapiens
tgcaggtgcacctttcatatgcaaattatcaatctagagcccatagcttgcatatgcaggtgcacctttcatatgcaaatta

SEQ ID NO: 5355 - DNA, 92 bp, homo sapiens
catttatttggtattaccattttacttggtattaccctttcacttggtattattggtaaatgttattaacatttatttggtattaccatttt

SEQ ID NO: 5356 - DNA, 103 bp, homo sapiens
ttgggttactaattctacaggtaacccaaattaggttactaatttgtaacctaatttggttacaaattaggtaacccaaattaggttactaattctacaggta

SEQ ID NO: 5357 - DNA, 88 bp, homo sapiens
ttaaagtatctttgatttctcaagaactgaaatttttgggcagccagaattatcgtagattttaaagtatctttgatttcttaagaac

SEQ ID NO: 5358 - DNA, 88 bp, homo sapiens
cattcatttgggtaggtaattagaaaggactgacgtatttcaatactttaacaactcttacgtgcattcatttgggtaggtaattaag

SEQ ID NO: 5359 - DNA, 75 bp, homo sapiens
ttttaggataaccatgttaaccaaaccagattgtttaaacattatgcttttaggataaccatgttaaccaaatga

SEQ ID NO: 5360 - DNA, 108 bp, homo sapiens
caaaaaaaaaaaaaaaaaagagatggccccagtgcactgcagtccagcctgggtgacagagtgagactcaatgtccaaaaaaaaaaaaaaaaagagatggccccagtg

SEQ ID NO: 5361 - DNA, 125 bp, homo sapiens
ataagtgtccatgaaatcttcacaatttatgttcagagattgcagtaaagacaggcataagaaattataaaagtattaatctggggaactaataaatgtccatgaaatcttcacaatttatgttc

SEQ ID NO: 5362 - DNA, 107 bp, homo sapiens
agagatattcttagaatctttcattatggtactcatatgcagactttatcaaccaatattgacagtttgagagatattcttagaatctttcattatggtactcatat

SEQ ID NO: 5363 - DNA, 113 bp, homo sapiens
catgggaaggaaggaaggaggggaggggaggggaggggaggggaggggaggggggggaaggaaggaaggaaggaaggaaggaaggaaggaaggaaggaaggaaggaaggaagg

SEQ ID NO: 5364 - DNA, 102 bp, homo sapiens
ttttcagatcatgaaaaataaaacatttttcattttctgaaaaaaataaaacatttttcattttctgaaaaatattttcagatcatgaaaaataaaacattt

SEQ ID NO: 5365 - DNA, 79 bp, homo sapiens
agtcaagctttatagtttatttacttatttggtttgtttttacaagacaaattagtcaactttatagtttatttactta

SEQ ID NO: 5366 - DNA, 75 bp, homo sapiens
ttttacatgataaaattaatccagctacctttagtcttacaacttgaataccttttacatgataaaattaatctc

SEQ ID NO: 5367 - DNA, 105 bp, homo sapiens
agtgctgattggtgcgtttttacagagtgctgattggtgcatttacaaacctttagctagacacacagtgctgattggtgtgtttttacagagtgctgattggtg

SEQ ID NO: 5368 - DNA, 92 bp, homo sapiens
tctgtgtctagctaaaggtttgtaaacacaccaatcagcactctgtaaaaacgcaccaatcagcattctgtgtctagctaaaggtttgtaaa

SEQ ID NO: 5369 - DNA, 81 bp, homo sapiens
caagtctctaggaagttccaaactttcccacatcttcctgtcttttgagcccttcaagtctttaggaagttccaaactttc

SEQ ID NO: 5370 - DNA, 119 bp, homo sapiens
tatccccatgttagtaatgagaaaattgaggctcagttgattctcagaataaccttgtgtgatacaggcaggtcaagttcttttatccccatgttagtaatgagaaaattgaggctcag

SEQ ID NO: 5371 - DNA, 442 bp, homo sapiens
attttacagggcactgtttggtccattttaaagagtgctgattggtccatttttacagagtgctgattggtgcatttacaaacctttagctagacacagagtggtgattagtgcttttttacagagtgctgattggtgtgtttacaaacctttagctagacacagaacgctgattggtgcatttacaatcatttagctagacagaaaagttctccaggtccccactagattagctagacacagagtgctgattggtgcatttttacagagtgctgattggtgtgtttacaaacctttagctagacacagagcgctgattggtgcatttacaatcctttagctagacagaaaagttctccatgtccccacctgattagctagacacagagtgctgattggtgtgtttacaaacctttagctagacacagagcactgattggtg

SEQ ID NO: 5372 - DNA, 184 bp, homo sapiens
ctgattggcccattttacagagtgctgactggtccattttacagtgctgattggtccattttacaaacctctagctagccacagagcactgattggtgcgttttacaatcctagctacagagtgctgattggtgcgttttacaatcctagctacagagtgctgattggtgcattttacaatcct

SEQ ID NO: 5373 - DNA, 355 bp, homo sapiens
agctagatacaaaggttctccatgtgcccatcagattagttagatacagagtttccacacacgggttctccaaggccccaccagagcagctagatacagagtgtcgattggtgcattcacaaaccttgagctaaacacagggtgctgattggtgtgtttacaaaccttgagctagatacagagtgccgattggtgtatttacaatccttgagctagacataaaggttctccacggcctcaccagagcagctagatacagagtgtcgattggtgcactcacaaaccttgagctaaacacagggtcctgattggtgtgtttacaaaccttgggctagatacagagtgccgattggtg

SEQ ID NO: 5374 - DNA, 192 bp, homo sapiens
tggtgcgtttacaatccctgagctagacacaaaagttcccgaagtccccactagatcagctagacacagagcatggattggtgcatttacaaaccttgagctagacacagggtgctgattggtgcatttacaaaccttgagctagatacagagtgctgactggtgcatttacaaaccttgagctagatacag

SEQ ID NO: 5375 - DNA, 117 bp, homo sapiens
catcactatagttcataaggcagaaacactgaggttttcatttttgttgttgttatctggatcatcctctttatgctgcctgcatcactatagttcataaggcagaaacactgaggt

SEQ ID NO: 5376 - DNA, 75 bp, homo sapiens
gttcctgccttaactgatgacattccaccacgaaagaagtgaaaatggcctgttcctgccttaactgatgacatt

SEQ ID NO: 5377 - DNA, 105 bp, homo sapiens
tgtctctgttttcatatggccatcttcttataaggacaacttatcttcacatactgttctccctgtgtctctgttttcatatggccatcttcttataaggacaac

SEQ ID NO: 5378 - DNA, 120 bp, homo sapiens
cgccattgcattccagcctgggggggacaagagcaagactttcgtctcaaagcccaggaggcagaggttgcagtgagctgagatcacgccattgcattccagcctggggggacaagagcg

SEQ ID NO: 5379 - DNA, 90 bp, homo sapiens
tccttgtctctaccccttctctgcttttccggggacagggcaagtaccccaaccccttctctccttgtctctaccccttctctgcttttc

SEQ ID NO: 5380 - DNA, 124 bp, homo sapiens
taatacttttataatttcttatgcctgtctttactgcaatctctgaacataaattgtgaagatttcatggacatttatcacttccctaataatactcttataatttcttatgcctgtctttact

SEQ ID NO: 5381 - DNA, 144 bp, homo sapiens
gccaggctggtctcaaactctgacctcaggtgatccacccgcctcagcctccaattttgtatttttagtagaaacagggtttcattatgtgggccaggctggtctcaaactctgacctcaggtgatccacccacctcagcctcc

SEQ ID NO: 5382 - DNA, 83 bp, homo sapiens
atactgcttcacactataaaaaagaaaaaatatcttgcattagaatccttcaacatctgcatactgcttcacactataaaaga

SEQ ID NO: 5383 - DNA, 89 bp, homo sapiens
gcagggctctgggtggttttaaagatagaggtggattcccccccccttttttttttggcagggctctgggtggttttaaaggtagaggt

SEQ ID NO: 5384 - DNA, 120 bp, homo sapiens
ccactgtgttcatgagcccatgggcaatgactggggtggccatctgtcagtgctgtcagtcagggcctaataatccttgctgccaggaccactgtgttcatgagcccatggggcaatgac

SEQ ID NO: 5385 - DNA, 77 bp, homo sapiens
agaagacaggaaaatgtgggaaactttacaacttcctaaagacttggagggctcagaagacaggaagatgtgggaaa

SEQ ID NO: 5386 - DNA, 96 bp, homo sapiens
cagatctgaggccgaggctgggtcacgaatctgggtgagggcttatgactactccaacagatgaactacaacagatctgaggccgaggctgggtca

SEQ ID NO: 5387 - DNA, 112 bp, homo sapiens
tcctcctagaccacaaggaggaccaaggaaggttggatttagtggcccttaccaacacattctcaaaaacctgcacccttgcttgtcctcctagaccacaaagaggaccaag

SEQ ID NO: 5388 - DNA, 86 bp, homo sapiens
ctgctttggtctgagttagcacacctagtgtaaatgttttattgagtcactgtgaaacctgctttggtctgagttagcacacctag

SEQ ID NO: 5389 - DNA, 82 bp, homo sapiens
taagtacaccccaggatatttgtccaatgtcacatttctcagaccgtctaggtttgtctaagtacaccccaggatatttgtc

SEQ ID NO: 5390 - DNA, 206 bp, homo sapiens
cgagtgtgtaataatgaaatttagaaaacactaaaatgtttatcactgtgtgtaatgaaattttagagtgtgtaataatgaaattagtgtgtaataatgaaatttatttcattattaactgtgtgtgtaataatgaaatttagtgtgtaataatgaaacttagaaaacactaaaatgtttatcattgtgtataataatgaaattag

SEQ ID NO: 5391 - DNA, 95 bp, homo sapiens
ttgaaagctgctgggaggggcacactgctgggagctaggttgtttatacaccatttcccattagtccttcgttgaaagctgctgggaggggcaca

SEQ ID NO: 5392 - DNA, 83 bp, homo sapiens
tatgtaagcacatactttatctagcacatactttatctagcacatactttgtaagtatgtgagcacatactttatctagcaca

SEQ ID NO: 5393 - DNA, 90 bp, homo sapiens
gtagctagctagaagtttgtaaaatgcaccaatcagtgctccgtaaaaatgcaccaatcagtgctcagtagctagctagaggtttgtaaa

SEQ ID NO: 5394 - DNA, 124 bp, homo sapiens
gacttcacagctagccaatgggtgtgctgaggctaggccaaggctgttctgtcaccgagacctagtgtgaaagacctagtgccttgacaggacttcacagctagccagtgggtgtgctgaggct

SEQ ID NO: 5395 - DNA, 115 bp, homo sapiens
tttttttcaccctgcagttcagaacgctcgaggaaacttcttgttttcagtttgtgttttttttcattcctttctttttttcaccctgcagttcagaacactcgaggaaacttct

SEQ ID NO: 5396 - DNA, 144 bp, homo sapiens
gttcttaacagataacatggagacagtgtaatactttcttaatgtgcaatgaagacctaattttgaggactactttaaagaagggttatttcgttcttaacagataacatggagacagtgtaatactttcttaatgtgcaatga

SEQ ID NO: 5397 - DNA, 80 bp, homo sapiens
gtgtgtgtataaccacattcattctttcttatggctgagtagtattctctagtgtgtgtgtataaccacattctttcttt

SEQ ID NO: 5398 - DNA, 102 bp, homo sapiens
aggggtacacacatggtgtacaccgcctgtgtcatcaggagtaacattcccctaggatattacgaataatatcacagcaggtgtacacacatggtgtacacc

SEQ ID NO: 5399 - DNA, 103 bp, homo sapiens
tctcgcccctctggctcttaggacccccatcgcaggggggcgaggcgccccccgcgatgcggggactgagagccagcccctctcgcccccctggctcttagga

SEQ ID NO: 5400 - DNA, 229 bp, homo sapiens
tgctgattggtccattttacagagtgcccattggtctattttacagagcactgattggtccattttacagagtgctgataggtccattttacagagcactgattgatccattttacaaaccttgagctagctacagagcgctgaatggtgcatttttacagagcgctgattggtgcattttacaaacctcttgctagctacagatcgctgatcggtgcgttttacaatc

SEQ ID NO: 5401 - DNA, 102 bp, homo sapiens
ggtgtacaccatgtgtgtacacctgctgtgatattattcgtaatatcctaggggaatgttactcctgatgacacaggcggtgtacaccatgtgtgtacccct

SEQ ID NO: 5402 - DNA, 190 bp, homo sapiens
agcccggtaatgaggctctcaattctgtccctgttcagccctgctgtagggccctcaaacttccacctgttcagcccggtaatgaggctctcaactctgtccctgttcagccctgctgcagggccctcaactttccatctattcggcctggcaatgaggccctcaaacctgtccctctgcagcctgatta

SEQ ID NO: 5403 - DNA, 110 bp, homo sapiens
accctctccagggcctcctctctgctaggagctgggcagatgttaggacaaccagctgcagagaggagctaccctctccagggcctcctctctcctaggagctgggcaga

SEQ ID NO: 5404 - DNA, 74 bp, homo sapiens
tacaattttgttaattcttgaattaataagaaggtgtgtgtatctatctatagaattttgttaattcttgaatt

SEQ ID NO: 5405 - DNA, 86 bp, homo sapiens
tccaggcagaatggatccgtttagcttcgactgagtgcacctgcccccaggagcgggtctccaggcagaatggatccctttagctt

SEQ ID NO: 5406 - DNA, 97 bp, homo sapiens
tccacctgtcactacaacaaagttgaccgctctcacgcactccttcttaagaaacagtggagacaaagttccacccgtcactacaacaaagttgacc

SEQ ID NO: 5407 - DNA, 113 bp, homo sapiens
cggtggctcccgcctgtaatcccagcacttcaggaggcagagacggggggatcaggaggtcaagagattgagaccgcctggcacggtggctcacgcctgtaatcccagcactt

SEQ ID NO: 5408 - DNA, 112 bp, homo sapiens
cacattttgtgtatccattgatggacatttgcgtggtttctacctttggatatggctgaataatattccatgaaatggatataccacattttgtttatccattgatggacat

SEQ ID NO: 5409 - DNA, 82 bp, homo sapiens
ctgaggcaggagaatcgcttgaacccaggaggtgcctatagtcccagctactcaggaagctgaggcaggcgaatcgcttgaa

SEQ ID NO: 5410 - DNA, 139 bp, homo sapiens
taatcaatagcaaggatctggcatccatctgtttacataccttgattcggtgcagttaatgatttatttttatttttatttttatttttgagaataatcaatagcaaggatctggcatccatctgttcacataccttga

SEQ ID NO: 5411 - DNA, 89 bp, homo sapiens
tgcactccagcctgggcaacagagggagactctgtcttaagaaaaaaaaaaaagaattgcaccattgcactccagcctggcaacagagt

SEQ ID NO: 5412 - DNA, 89 bp, homo sapiens
tccttcacccttagcggcaagtcccgcttttctgggagaggggcaagtacccctccaccccttctccttcactcttagcggcaagtccc

SEQ ID NO: 5413 - DNA, 111 bp, homo sapiens
gccccttaggtcacgggcctggggggctcaaatgccagggagctctctcttgacagagctgaccagcccggccccttaggtcacgggcctggggggctcaaatgccaggga

SEQ ID NO: 5414 - DNA, 103 bp, homo sapiens
aacgcaccaatcagcaccctgtcaaaacggaccaatcagctttctgtaaaacagaccaatcagctctctgtaaaatgaactaatcagcaggatgtgggtgggg

SEQ ID NO: 5415 - DNA, 82 bp, homo sapiens
aaataagctgatatacaaattaagcccttattttcaccggttttttaataatgactgtaaataagctgatatacaaattaag

SEQ ID NO: 5416 - DNA, 85 bp, homo sapiens
agaccagcctggccaacatggtgaaaccccgtctctcacctaaggtcaggagttcaagaccagcctggccaacatggtgaaaccc

SEQ ID NO: 5417 - DNA, 90 bp, homo sapiens
tttttctcataaacttggaaagaaacaatgaattcaaaatggaaagtagttaaaaatctgaaatgatttttctcataaacttggaaagaa

SEQ ID NO: 5418 - DNA, 125 bp, homo sapiens
ataaatgtccatgaaatcttcacaatttatgttcagagactgcagtaaagacagacataagaaattatacaagtactaatttggggaactaataaatgtccatgaaatcttcacaatttatgttc

SEQ ID NO: 5419 - DNA, 94 bp, homo sapiens
ggtgcatttacaatcctctagctagacacagagcgctgattggtgcgtttttacagagtgttgattggtgcgtttacaatcctctagctagaca

SEQ ID NO: 5420 - DNA, 81 bp, homo sapiens
gtctaacctcctctagctgataaagaaccaaggctcagaaagactgaataacgtgtctaacctcctctagctgataaagaa

SEQ ID NO: 5421 - DNA, 131 bp, homo sapiens
ctcaagtgatccacccgccttggcctcccaaagtgctgggattacaggcaggagctaccttgcccagccgacctgcatccttgaccaccaggactcaagtgatccacccgcctcggcctcccaaagtgctg

SEQ ID NO: 5422 - DNA, 88 bp, homo sapiens
aatcagtgctctgtagctagcaagaggattataaaatgcacaaatgagcactctgtaaaacaccaatcagtgctctgtaaaatgcacc

SEQ ID NO: 5423 - DNA, 100 bp, homo sapiens
atcatagcatggactcttcatggcctcagtgactggtttttggtggacacctgactccagtttggcctatcatagcatggactcttcatagcctcagtga

SEQ ID NO: 5424 - DNA, 77 bp, homo sapiens
cagtatgtatttccccaaagaagcaacactctcctaccaacactctaaattttccagtatgtatttccccaaaagaa

SEQ ID NO: 5425 - DNA, 166 bp, homo sapiens
aaagagaggagctaccctctccactgatagcttcagagatctgcagagagagtggggcaacctgccagacagagaggagctaccctctccagggactcctctctgctgaaacctgaacactcgacagaatgacctgcctgcctacagaggggagctatccactgtg

SEQ ID NO: 5426 - DNA, 134 bp, homo sapiens
gaattaaatgtaataaatttacatgttacatgtaataaactacatgaaacctgacatgctaatacatgtaaattgcatgctgatgtatgaattaaatgtaataaatttacatgttacatgtaataaattacatg

SEQ ID NO: 5427 - DNA, 91 bp, homo sapiens
ggcaaaggcgacattgttccaattctatttacgtgttcttttatatagaagacgggaagagtaaggcaaaggtgacattgttccaattcta

SEQ ID NO: 5428 - DNA, 87 bp, homo sapiens
ctccgacctctcagaccgagtgagcttaactaagccgttactcgcgtgccagcagttgggcgctccgacctctcagaccgcgtgagc

SEQ ID NO: 5429 - DNA, 121 bp, homo sapiens
aacataagttgtgaagatttcatggacatttattagttccccaaattaatacttttataatttatgcctgtctttactgcaatctctaaacataaattgtgaagatttcatggacatttat

SEQ ID NO: 5430 - DNA, 124 bp, homo sapiens
ggggtttcaccatattggtcaggttggtcttgaactcctgacccgcccaccttgacctcccaaagtgctgggatttttagtagagacggggtttcaccatattggtcaggctggtcttgaactc

SEQ ID NO: 5431 - DNA, 117 bp, homo sapiens
aaaaatagattaatttttctcatataataagaaataagcattatggagctggtgcagttattcaaagtgaataaaaaatagattaatttttctcatataataagaaataggcattat

SEQ ID NO: 5432 - DNA, 167 bp, homo sapiens
attagttttaattaatttgaccagcaccttgactttagtttacaaagtcacaaatttgtaactttacaaatttgtaaagtttttattaattttaattagtttttataattttaattagttttaattaatttgaccagcaccttgactttagtttacaaagtcacaaa

SEQ ID NO: 5433 - DNA, 80 bp, homo sapiens
ttcatcatccccaaaagaaaccctttaacatcaacacctttttccatcaacaccttcaccatccccaaaagaaacccttt

SEQ ID NO: 5434 - DNA, 81 bp, homo sapiens
cttatttaatattattgctgattcattgacattgaactcacctgtttaaagatagcttatttaatattactgctgattcat

SEQ ID NO: 5435 - DNA, 236 bp, homo sapiens
agctagatacagagtgtggacacaaaggttctccaaggccccaccagagtagctagatacagagtgtcgattggtgcattcacaaaccctgagctagacactgggtgctgattggtgtgtttacaaaccttgagctagatacagagtgccgattggtgtatttacaatccctggactagacataaaggttctccaaggtcccaccagagtagctagatacagagtgtccattggtg

SEQ ID NO: 5436 - DNA, 75 bp, homo sapiens
aatgtcatcagttaaggcaagaacaggccattttcatttcttttgtggtggaatgtcatcagttaaggcaggaac

SEQ ID NO: 5437 - DNA, 95 bp, homo sapiens
tctgctctgctgagagctgagcagacatggggtcgacctccctgaggagaggagctacccactgtgggtcttctctctgctgagagctgagcaga

SEQ ID NO: 5438 - DNA, 85 bp, homo sapiens
ttggcacagaatagacacttgttggatgaatgaagcagcaacagtgcctagcctataattggcacagaatagacacttgctggat

SEQ ID NO: 5439 - DNA, 160 bp, homo sapiens
accagctgtagagaggagctaccctctctgctgagagcttcagagaacttcagggatgtcaggactaccagctgcagagaggagctacccactccagggcctcccctctgctaagagctaggcagacatcaggctgatcagctacagagaggagtctacc

SEQ ID NO: 5440 - DNA, 104 bp, homo sapiens
ctcagagaattccctcagattcaactacacttagctgcatcccattttaatgaaagggatttcttgctttccttattctcatagaattccctcagattcaacta

SEQ ID NO: 5441 - DNA, 107 bp, homo sapiens
aataacaataaccagagtaattctacaagctattcaagctaaatttctagacggataatgtatttaaagtggaaaaacaagaataacaataagcagagtaattctac

SEQ ID NO: 5442 - DNA, 102 bp, homo sapiens
ccaaaaccagacaaagacaaaataaaaaaggaaaacacattctacaagaccagcattaccccgataccaaaatcagacaaagacaaaataaaaaaggaaaac

SEQ ID NO: 5443 - DNA, 82 bp, homo sapiens
taaagcctgccaccagatgcagctatacaattgaagtacctcaacttactttccactataaagcctgccaccagatgcagct

SEQ ID NO: 5444 - DNA, 122 bp, homo sapiens
ccagagggaaaaacgttgcaggtttgttcttttcgtattataattcacatccttgggcttcttgctgccatcccagtgttgtctccacccagagggaaaaacgttgcaggtttgttcctttc

SEQ ID NO: 5445 - DNA, 108 bp, homo sapiens
agttaatctgaacaatagagaggaaaaagattaaaaagtttagaggaaagaatcattgaactgggaattagaacaatagaagttaatctgaacaaaagagaggaaaaa

SEQ ID NO: 5446 - DNA, 124 bp, homo sapiens
taatacgtttataatttcttatgcctgtctttactgcaatctctgaacataaactgcaaaaatttcatggacatttatcacttccctaataatacttttataatttcttatgcctgtctttact

SEQ ID NO: 5447 - DNA, 92 bp, homo sapiens
actggcataacattatccaaatgtattacaactatacgatgattggcatatagttgtaatacatgagaactgccataacattatccaaatgt

SEQ ID NO: 5448 - DNA, 187 bp, homo sapiens
catttctggataaaaatatatttgatacttaaatctttgatatttaaattatttaatatcctaagagttttcaaagttggcatttctgcataaagatatatatatagcaaatatatatctttatggagaaatggcagattttaaaaaatccttaaagttgccatttctgcataaatatatatatata

SEQ ID NO: 5449 - DNA, 103 bp, homo sapiens
aaataaatgttttactgtaagatacttttttactgtattttaataaatgtttctaaataaatgtttaataaatgtatctaaataaatgttttactgtaagata

SEQ ID NO: 5450 - DNA, 103 bp, homo sapiens
gaaacataagtctttctagatgtttagagatgcccaaaatatgttaaaagcagaggcagtaaatatagtagaggtagaaacatagtctttctagatgtttaga

SEQ ID NO: 5451 - DNA, 108 bp, homo sapiens
tagcaaattaaattcaacaatatattttatatatataaatatatatttatatatatatttattctatatatatatttaattaatagcaaattaaattcaactatatat

SEQ ID NO: 5452 - DNA, 124 bp, homo sapiens
ggcccctgctgccttctgtgtctgctgtaatgagtggcatctttcgattggagatgaagggacctggtggttttccaacggcccctgctgcctgctgtgtctgctgtaatgagtggcatctttc

SEQ ID NO: 5453 - DNA, 94 bp, homo sapiens
attattccacacttaaagatatacattgaataaggtataatgtatacattttattcattgatgcattgaatattattccacacttaaagatata

SEQ ID NO: 5454 - DNA, 125 bp, homo sapiens
gaacataaattgtgaagatttcacggacatttattagttccccaaattagtacttttataatttcttacacctgtctttactgcagtctctgaacataaattgtgaagatttcatggacatttat

SEQ ID NO: 5455 - DNA, 102 bp, homo sapiens
tttgatgtgaagccttttttattttttaatgtaggtttgatttcagacctttttttgcaaactttgatttcttaaggtttgatttgaagccttttttatttt

SEQ ID NO: 5456 - DNA, 117 bp, homo sapiens
tcaataaatggtgctggaataattggctagccatatgcagaagactgaaactgaacccccttccttatgctgttcaataaatggtgctggaataattggctagccatagcagaagat

SEQ ID NO: 5457 - DNA, 82 bp, homo sapiens
atgtggggaagtttggaacttcctagagacttggagggctcagaagacaggaagatgtgggaaagtttggaacttcctagag

SEQ ID NO: 5458 - DNA, 125 bp, homo sapiens
atctatgattccatttaccttaaactctagagctgaaaaaagttggaaaatggaaaatggaaaaaagttggaaaaagctgaaaaatggaatctatgattccatttaccttaaactctagagctga

SEQ ID NO: 5459 - DNA, 89 bp, homo sapiens
tgttatttctgattgacaaaaattagactgaaaattacaatttttttttctgatttacatgtgttatttctgatttacaaaaattagac

SEQ ID NO: 5460 - DNA, 98 bp, homo sapiens
tccttcactctctattgaaaccattctcacacagatgtcttgatgccttcctgtcctctttaactccaatttcattccttcactctctgttgaaacca

SEQ ID NO: 5461 - DNA, 81 bp, homo sapiens
aaaaatacaaaaattagccgggctaaaaatacaaaaattattaaaatacaaaaacactaaaaatacaaaaattagctgggc

SEQ ID NO: 5462 - DNA, 98 bp, homo sapiens
ctggctaaaccccaccctcaagcctagaacccctaacctaagtgaaaacagccgatcctgaagggctgggcttctggctaaacctcaccctcaagcct

SEQ ID NO: 5463 - DNA, 82 bp, homo sapiens
agtctctaggaagttccaaacttccccacatcttcctgctttctgagccctccgagtctctaggaagttccaaactttccca

SEQ ID NO: 5464 - DNA, 87 bp, homo sapiens
ggatgaaaaacttgataatttcaaaaagtgtctcttaaaatcagagcaaaaaatagatctaaaggatgaaaaacttgataatttcaa

SEQ ID NO: 5465 - DNA, 96 bp, homo sapiens
gaaagtgagccattttattctacaagtaagtacatttcttcctagaaaagagtttaatagtcagtagtctttcgaaagtgatccattttattctac

SEQ ID NO: 5466 - DNA, 111 bp, homo sapiens
tgtctgacacattttgcctatcccttttttatcttttggctttctttcttccctcccttccctccttccttctccaccctagatgtctgacacattttgcctatcctttta

SEQ ID NO: 5467 - DNA, 88 bp, homo sapiens
ttttgtattttttgtagaaacagggttttaccacgttgcctgccaccacgcccagctaatttttctattttttgtagaaacagggttt

SEQ ID NO: 5468 - DNA, 99 bp, homo sapiens
ttcccctttgtcccgagaatactcttgtctctaattctaatgtaacatcatatacatttctgttacattagggttttcccatttgtcccgagaatactc

SEQ ID NO: 5469 - DNA, 96 bp, homo sapiens
ggggtttcgccatgttggccaggctggtcttgacgcctggctaatttttgtgtttttggtagagacggggtttcgccatgttggccaggttggtct

SEQ ID NO: 5470 - DNA, 96 bp, homo sapiens
acaaacaaatcatcctatgtcatccctttaaatccctttgttgaaaggaaacttttaaaatatacacaaataaatcatcctatgtcatccctttaa

SEQ ID NO: 5471 - DNA, 98 bp, homo sapiens
atttaaaggaatgacataggatgatttatttgtgtatatttttaaagtttcctttcaacaaagggatttaaagggatgacataggatgatttatttgt

SEQ ID NO: 5472 - DNA, 125 bp, homo sapiens; identical to SEQ ID NO: 2054

SEQ ID NO: 5473 - DNA, 103 bp, homo sapiens
taagggtagaaatattatttgctcaaaattataactaagaccatttattgaaagatctgcagaataaggatagaaatattatttgctcaaaattataactaag

SEQ ID NO: 5474 - DNA, 96 bp, homo sapiens
ccagttctggagttagactgatgccctgaatgacttgggcaacttccttcacagaaacttcgtgcctcagtttccagttctggagttagattgatg

SEQ ID NO: 5475 - DNA, 82 bp, homo sapiens
atggcacacacttcataaatatgtaatatttacatatttggcacacactggcatatggcacacacttcataaatatgtaata

SEQ ID NO: 5476 - DNA, 118 bp, homo sapiens
catggaccacaggttgttcctgtggctttccccctttaaacactaaaactcttaatattatctctggaaaaaaaaaaaaaaaaaaaaggcatggaccacaggctgttcctgtggcttt

SEQ ID NO: 5477 - DNA, 90 bp, homo sapiens; identical to SEQ ID NO: 5379

SEQ ID NO: 5478 - DNA, 122 bp, homo sapiens
ataaatgtccatgaaatcttcacaatttatgctcacagattgcagtaaagacaggcctaagaaattataaaagtattaatttggggaactaataaatgtccatgaaatctccacaatttatg

SEQ ID NO: 5479 - DNA, 90 bp, homo sapiens
tatgtatacatggatatacacatgcacacacatatatatgtgtacacacaattttgtatatgtatatatggatatacacatgcacacaca

SEQ ID NO: 5480 - DNA, 90 bp, homo sapiens
aaagagaaagagagtgtttgcttcattatggactaatacaagctttattccaaaaacaaaacaaaagagaaagagagtgtttgcttcatt

SEQ ID NO: 5481 - DNA, 79 bp, homo sapiens
attggttttgcttatttgtaaatttatttgtagacttggtccctatcactacgaattggttttgcttatttgtaaactt

SEQ ID NO: 5482 - DNA, 104 bp, homo sapiens
tgagatcctaatgaaagccagagcgttgatgaagtatgggagtttttaacttatatttggaggtgagagttctgtacccttgagatcctaatgaaaaccagagc

SEQ ID NO: 5483 - DNA, 83 bp, homo sapiens
ggtcattccatggccttttacattccatgtcttaatgaatcaatgagatgaacaaacaggtcattccatggcctcttacattc

SEQ ID NO: 5484 - DNA, 101 bp, homo sapiens
gagtagataatatttctagcttattaattttaaaaagtgaaaataagtgattcatgggagaggaataacagcttctgtgagtagataacatttctagctta

SEQ ID NO: 5485 - DNA, 89 bp, homo sapiens
tatatatataatgcctagcatgtgtgtgtgtgtatatatatatgtgtatatatatatatatgtatatatatatataatgcctagtatgt

SEQ ID NO: 5486 - DNA, 102 bp, homo sapiens
tggaactagcagacaaggactataaaagatatatgataaatatgttgttctattgatactcaacatactggaactagcagacaagaactataaaagatatat

SEQ ID NO: 5487 - DNA, 85 bp, homo sapiens
ttgttttgaaattttgggaacttacaggtcctcataagagtatataggttaaacccattgtttgttttgaaattttggggactta

SEQ ID NO: 5488 - DNA, 90 bp, homo sapiens
tgttgttttcaggacagcctctgaaacgaaaaggaaggtgtgttgttgttgttgttgttgttgttgttgtttcaggacagcctctgaaac

SEQ ID NO: 5489 - DNA, 128 bp, homo sapiens
gtgatactcaccccgggaagagtgaggaactgatccaggctgaaggagactagagacatgatggctggatgcaacactcgtgatactgaccccgggaagagtgaggaactgatccaggctgaaggaga

SEQ ID NO: 5490 - DNA, 92 bp, homo sapiens
gggtacatggggtgactcacagttctgccctatgccaactggctggggtcccctggaggctgggggtacatggggtgactcgcagttctgcc

SEQ ID NO: 5491 - DNA, 103 bp, homo sapiens
ttatttattatttattttcatagtttatatttcggtggggataaggttttggggattatctctaggtggtgggatttatttattattttcatagtttatattt

SEQ ID NO: 5492 - DNA, 84 bp, homo sapiens
caacaagtgtgtgtcaatagaaaattattttaattgaaatgatctattttaattatcaacaagtgtgtgtcaatagaaaattat

SEQ ID NO: 5493 - DNA, 91 bp, homo sapiens
cagaacaaatgacctgtgcacttattggagaagtgctgggatagttgaaaagactccttttaaatattcagaacaaatgacctatgcactt

SEQ ID NO: 5494 - DNA, 103 bp, homo sapiens
catatgagaaaagcttcataacactagaaatacagaaaatataggagaaaagcttcataacactagaaatatagaaaacataggagaaaagcttcataacact

SEQ ID NO: 5495 - DNA, 105 bp, homo sapiens
aagttaatctaacacacatatgtaaaatattggacaaaaatcagggctacaaaatttatataatgcaattcataagttaatctaacatacatatgtaaaatattg

SEQ ID NO: 5496 - DNA, 89 bp, homo sapiens
gagtagctgggactacaggcaccatccgcctcccgggttcacgccattctcctgcctcagcctcctgagtagctgggactacaggcacc

SEQ ID NO: 5497 - DNA, 96 bp, homo sapiens
tactggtaatacccttttctacatcacacacacacacacagagtagtgtctgtagtttgtacattccaggaaatactggtaatacccttttctaac

SEQ ID NO: 5498 - DNA, 97 bp, homo sapiens
ggaggattcaccaccagactggaaagcaacagcctgggttccagagtcagatacaaaactcaccagactgtggaggattcaccaccagactgggaag

SEQ ID NO: 5499 - DNA, 75 bp, homo sapiens; identical to SEQ ID NO: 2098

SEQ ID NO: 5500 - DNA, 125 bp, homo sapiens
catgtaaccaaacaccacctgttccccaaaaacctaaaattaaaaaaaattctgaaaaataaatctcagaaattaccactaaacttattcatgtcaccaaacaccacctgttccccaaaaaccta

SEQ ID NO: 5501 - DNA, 128 bp, homo sapiens
acagtggatgtatgcaggtggctctgacaaaagcgaagaaatatcttctggggattataaaagtgctggaaatctagcattacccctaacagtggatgtatgcaggtggctctgacaaaagctaagaa

SEQ ID NO: 5502 - DNA, 82 bp, homo sapiens
actttgttttccttagagttgaaacagtaaccgagaattataaaatgagaataatgatactttgttttccttagagtagaaa

SEQ ID NO: 5503 - DNA, 92 bp, homo sapiens
ctttaaatattcttagaaaaagatatctcttaatgatgctttaaaggcacaaatccagaatattctttaaatattcttagaaaaaatatctt

SEQ ID NO: 5504 - DNA, 103 bp, homo sapiens
ccagttccttcagcctcttgggcctggatctatccaattccagttccttcagcctcttgggcctggatctatccaattccagttccttcagcctctgggccta

SEQ ID NO: 5505 - DNA, 92 bp, homo sapiens
ttttaagtaacagtcctccatcaggtatgttttattgagttttaaaggttctttagacattttaagtaacagtactccatcaggtatgtttt

SEQ ID NO: 5506 - DNA, 78 bp, homo sapiens
gttttacaagggactttttaagaaaacatttctacctgagaaaacacttctagttttacaagggactttttaagaaaa

SEQ ID NO: 5507 - DNA, 92 bp, homo sapiens
tctgctgagagctggacacttgctgggatgatccacctgcaggaaggagcaactactacaggtctcctctctgctaagagctggacacttgc

SEQ ID NO: 5508 - DNA, 153 bp, homo sapiens
gggtggtggccgggcagaggggctcctcacttcccagtaggggcggccgggcagaggcgcccctcacctcccggacgaggcggctggccgggcagggggctgaccccccccccacctccctcccggacggggcggctggccgggcaggggggc

SEQ ID NO: 5509 - DNA, 78 bp, homo sapiens
taataacagtagctaacatttattgctgctcggccttttggctaagatcaagtgtagtaacagtagctaacatttatt

SEQ ID NO: 5510 - DNA, 102 bp, homo sapiens
actaaactgtgattcactggctgttagtggtatccgcatattcaggatgcaacaccctctctagtcaactgctctttccactaaactgtgattcactgggtg

SEQ ID NO: 5511 - DNA, 85 bp, homo sapiens
cttgcccctcccccagaaaagcagagaaggggtagagacaaggagagaaggggttggggtacttgcccttcccccagaaaagcag

SEQ ID NO: 5512 - DNA, 97 bp, homo sapiens
ccctatattgcccaggctggtctttaactatatttatgtttactttacaatatagggagatggggtccccctatattgcccaagctggtctttaact

SEQ ID NO: 5513 - DNA, 107 bp, homo sapiens
ctgatttttacagatgaaatttacatctgtaaaatttttacagatgaaatttacatctgtaaaatgtaaattttacatctgtaaaaattttacagatgaaatttaca

SEQ ID NO: 5514 - DNA, 97 bp, homo sapiens
tttgctttgtgaaatcctaattttctaatttctaattttcttatgtagtgattgtaagactgatagcagtttgctttgtgaaatcctaattttctaa

SEQ ID NO: 5515 - DNA, 110 bp, homo sapiens
tttttgtattttcagtagagatggggtttcatcacattccctcagcctcacaagtaccactgccaccacacctggatagtttttgtatttttagtagagatggggtttca

SEQ ID NO: 5516 - DNA, 102 bp, homo sapiens
cttgtgtatgtttggtagagacagagtatgtcttgtgtatgtttagtagagacagggtttagtagagacagggtatgtcttgtgtatgtttagtagagacag

SEQ ID NO: 5517 - DNA, 111 bp, homo sapiens
agtgctgggattacaggcgtgagccaccacgcccggccagtctcgatctcttgaccttgtaatctgcccgcctccgcctcccagagtgctgggattacaggcatgagccac

SEQ ID NO: 5518 - DNA, 195 bp, homo sapiens
aagccaccatgctgagaccccatctctcaaaaatataaaagggaggtgttctctaggtcagggcatggcctgtggagccaccatgctgagaccccatctctcaaaaatatagaagggaggcattctctgtgtcagggcacggcctgtcgagccaccatgctgagaccccatctctcaaaaatagagaagggaggc

SEQ ID NO: 5519 - DNA, 75 bp, homo sapiens
tttagtagagacggggttttgccgtgttcgccaggctggtaattcttgtatctttagtagagacagggttttgcc

SEQ ID NO: 5520 - DNA, 206 bp, homo sapiens
tacacaccaacacagtgcacacaatgcacacgggccgacagtgcacaaacatgcatgcacacaccaacacagtgcacacacgcatgcacaccacagtggagacatcacacacatgcacaccacagtacacacacatgcagacaccaataccgtacacatatgtgcacactgcacacagacatgcacataccaacacctggcacaag

SEQ ID NO: 5521 - DNA, 220 bp, homo sapiens
gccccgcccctttccgcaggcgcagtaggcaccgcccgccagcccgcgcccgccccgcccctttccgcaggcgcagtaggtggcacccgcaggcctgtgcctgccccgcccctttccgcaggcgcagtgagcgtcgacccgcccctccccgcccgcttccgcaggcgcagtaggacccgccctggtccgcgcctgccccgttgctttcctcaggctctaa

SEQ ID NO: 5522 - DNA, 97 bp, homo sapiens
gctctgtcgcacaggctggagtgaattggtgcaatcatgctcgctaattttttttttttttgagacagaatctcgctctgtcacacaggctggagtg

SEQ ID NO: 5523 - DNA, 90 bp, homo sapiens
aggcaggagaatggcgtgaacctgggaggcgcttgtagtcccagctactcgggagactgaggcaggagaatggcgtgaacccgggaggcg

SEQ ID NO: 5524 - DNA, 93 bp, homo sapiens
gtgtcagtgctaatggaaatgataggctggagtttgagaatgtagctgaacctccattgcctgtgtcagtgctaatggaaatgatagggtgga

SEQ ID NO: 5525 - DNA, 113 bp, homo sapiens
tacggggacacccaccctctggccacaccgctgcagctgccccaggggttaccggatgcagggccccagcctgccctgcctagttacggggacacccaccctctggccagcac

SEQ ID NO: 5526 - DNA, 73 bp, homo sapiens
atccacccacctcggcctcccaaactgctgggattataggcgtgaggtgatccacccaccttggcctcccaaa

SEQ ID NO: 5527 - DNA, 91 bp, homo sapiens
aggattcccagcaccttcagacgcagcgtggccgaggctgcagagaggcctgggagggaggattcccagcaccttcagacacagcgtggcc

SEQ ID NO: 5528 - DNA, 121 bp, homo sapiens
caccatgttggtcaggctggtctcaaactcctgacctcatgatccgcccacctcagcctcgcaaagtactgggattacaggcatgagccaccatgttggtcagtctggtctcaaactcctg

SEQ ID NO: 5529 - DNA, 75 bp, homo sapiens
gttcctgccttaactgatgacattccaccacaaaagaagtggaaatggcctgttcctgccttaactgatgacatt

SEQ ID NO: 5530 - DNA, 101 bp, homo sapiens
gtcaacagctccccagttggggagatgtgatcccagtcaagtcattcaaactccctggtcctcagtctccccatctgtcaacagctccccagtttgggaga

SEQ ID NO: 5531 - DNA, 101 bp, homo sapiens
ggtttgcatatggaaggcacacttacagatggtccctgccctggggagggtgtaggctctggactggttaccggtttgcatatggaaggcacacttacaga

SEQ ID NO: 5532 - DNA, 93 bp, homo sapiens
ctcctaaaaccccagcccaaaacggccctcagttcccgagaacagacatagaagagacccagccaggacactcttaaaaccccagcccaaaac

SEQ ID NO: 5533 - DNA, 78 bp, homo sapiens
gccaggactggggccaagtggccctggggatcctcgaggcggctcgacccgggagccaggactggcgccaagtggccc

SEQ ID NO: 5534 - DNA, 112 bp, homo sapiens
tctcacttgtctgtgaattgtctaggtcacttcctttcctgagcctcagtctccccttctgttcaacggggtgggtgagatcgcatctcacttgtctgtgagttgtctaggt

SEQ ID NO: 5535 - DNA, 82 bp, homo sapiens
tcctgggctatgttctcacctggagctcgattggggaagagctgtgttcaggtgtgtcctgggctgtgttctcacctggagc

SEQ ID NO: 5536 - DNA, 110 bp, homo sapiens
ttctcctctcccagttgcccctccttcagcccatgtttccatggtgggcataccgggtctgcaccaggtttctcctctcccagctgcccctccttcagcccatgtttcca

SEQ ID NO: 5537 - DNA, 87 bp, homo sapiens
aaatgtctgcagggctttctgggagagtgaacacacatgtggcctctccctgtgcccacatgaaatgtctgcagggctttctgggag

SEQ ID NO: 5538 - DNA, 112 bp, homo sapiens
gagggcctgccacatcactgggagggtgcagggaaggaaacccgagtcctcaggagggaaggccaacgtcagctggagcccgagggcctgccacatcaccgggagggtgcag

SEQ ID NO: 5539 - DNA, 88 bp, homo sapiens
gctggtggggacagggatgggaccctctgggctagcctgggtctgcccccggtatgtggctgctggtggggacaaggatgggaccctc

SEQ ID NO: 5540 - DNA, 85 bp, homo sapiens
tggttctatggttttggtgctggtagcactgctggtggtggtcatgatgctagcagtgtggtggttctgtggttttggtgctggt

SEQ ID NO: 5541 - DNA, 133 bp, homo sapiens
aaacggtagaactgtaggaccgggaggggtctcaggaggctgcggctggttctgtctagttggtcccattcctccgatggggatcctcaaacggtagaactgtaggaccgagaggggtctcaggaggctgcgg

SEQ ID NO: 5542 - DNA, 81 bp, homo sapiens
cctgcacccgagctcgtccctctgcccctgcaggccacacacacacacaccctgagcgcctgcacccgagctcgtccctcc

SEQ ID NO: 5543 - DNA, 104 bp, homo sapiens
ggtatacgctcaaaagcaggattaccagccgggtgtggtggctcacgcctgtcatcctgctttcaatcatcttgggtatacgctcaaaagcaggattgccagcc

SEQ ID NO: 5544 - DNA, 109 bp, homo sapiens
gagtgtgcaggtggtgagtgttgatgtggtgtgggtctaaacacacacaggcaggtactggacgggaacacgagtgtgcaggtggtgactgttgatgtggtgtgggtct

SEQ ID NO: 5545 - DNA, 122 bp, homo sapiens
ggtgtgggctgtggagtgggggcattctcaggccctggctctcgccctggctgcgcctctggagcttcctcttccaggtgtgggctgtggagtggaggcattctcaggccctggctctcgcc

SEQ ID NO: 5546 - DNA, 93 bp, homo sapiens
cataccctgggctctgttggcgaggtctgaccacggaggctctgtaccatgtggctggtcataccctgggctctgttggcgaggtctgaccac

SEQ ID NO: 5547 - DNA, 136 bp, homo sapiens
caggtattgatgttggctttccacgggtgcagtgagctgcgtgattgatacccatttccccataaaacagccaagccagggaggccagcatgcacacaggtattgatgttggctttccatgggtgcagtgagctgc

SEQ ID NO: 5548 - DNA, 182 bp, homo sapiens
catacacacatccatagggccagggatgaggatgtggacatctttaggggaccattattctgtctaccacatacacacatccacagggccagggatgaggatgtggacatcttcaggggaccattattcagtctaccacatacacacatccacagggccagggctgaggatgtggacatctt

SEQ ID NO: 5549 - DNA, 83 bp, homo sapiens
gttctggcccccccatcagcctctctcgcttctgcagctctccgggggaggagggggttctggccccccatcagcctctctcg

SEQ ID NO: 5550 - DNA, 69 bp, homo sapiens
cacacatggcaacagtacacacacacaaccacagtgcaaacgtggacacacaccaacacatgggacaca

SEQ ID NO: 5551 - DNA, 110 bp, homo sapiens
ggtgtccctctccaaggtgctgaaacgcccctatgcacccaggtctagaggcaccgcccaggcaatccaggtgtggcggtgtccctctccaaggtgctgaaacgccccta

SEQ ID NO: 5552 - DNA, 83 bp, homo sapiens
ggccctgtggccagagctgtcccctgccaggaaagggttaccgtcacgggcccacgggccctgtggccagagctgtcccctgc

SEQ ID NO: 5553 - DNA, 120 bp, homo sapiens
tgaaggcaggccccacagagacgcgcccagctcctgctcctcaaactgctccgttaaacacggggtgaccacacagccccgagagaatgaaggcaggccccacagagacacgcccagctc

SEQ ID NO: 5554 - DNA, 80 bp, homo sapiens
ttgccacctgggagctgtaggaaccctgggtaccgggcctcaaacctggggttcttggcacctgggagctgtaggaaccc

SEQ ID NO: 5555 - DNA, 90 bp, homo sapiens
ggtggcaatgccagaccagaaacaccagccaccaaaagagttcctcaaacccgagctgaagctcacaggtggcgatgccagaccagaaac

SEQ ID NO: 5556 - DNA, 87 bp, homo sapiens
tgggcctgctcacctctgcaccccgtgggggctgcccagaggggccccacactctcaggacggtgggcctgctcacctctgcagccc

SEQ ID NO: 5557 - DNA, 81 bp, homo sapiens
gtggggccgagacacacaccctccatagagtagacagctagggacaacagggtcccgtggggccgagacacccaccctcca

SEQ ID NO: 5558 - DNA, 85 bp, homo sapiens
gctgcctcaggctgggtgtggaggacaggggtccaggggaggacgggggagacgtgcggggctgcctcaggctgggtgtggagga

SEQ ID NO: 5559 - DNA, 85 bp, homo sapiens
gagaatggcaggagggtggctgagcctctcacgtctgggtaatgctccctggcactcccggagcatggcaggagggtggctgagc

SEQ ID NO: 5560 - DNA, 122 bp, homo sapiens
gggactgactgtgggggctgccctggcactgggagcgacgcagcctgccgactctggacccagcagctgaggaactccctcaaggacgggactgactgggggggctgccctggcactgggag

SEQ ID NO: 5561 - DNA, 112 bp, homo sapiens
ccaggccccagcaggtatcctgggcccagggggtgacgctgaggacccagcctctccaagatacgggcgttgcagagggcgggccaggccccagcaggcatcctgggcccag

SEQ ID NO: 5562 - DNA, 545 bp, homo sapiens
tcggcctcccacagtgctgggatgacaggtgtgagccaccgcgcccggcctctccgtctgcgtcggcctcccacagtgctggggtgacaggtgtgagccgctgcgccggccgcatgtgtgctcttgagagcacttctctggggagcatcccggatctgaactgctggttgtcaggcaagtgtgtgttctgcttctctagcaagtgccaaattcttttctgaacgatggctctagctggcactgtgagcattttatttcattttatcttattttatttatttactttgagacagactcttcctctgttgcccaggctggagtgcagtgatgtgatctcggctcactgcaatctccgcctcctggttcaagcaattcttctgactcagcctcccaaatagctgggactacagccgtgtgccaccaggctaatttttttgcattctaatagagacggggtctcactgtgttgctcccaggctggtctcaaactcctgagcatccgcccatctcggcctcccaaagtgctaggattacaggcatgagcc

SEQ ID NO: 5563 - DNA, 75 bp, homo sapiens
attgagggttaggggctggattggtatttggatacacacgtgtgtacgtaattgagggttaggggctggattggt

SEQ ID NO: 5564 - DNA, 86 bp, homo sapiens
gccccttgtcacggtgggcccagcacggccctagcctgccccttgtcagtaccaccctagcccgccccttgtcacggtgggcccag

SEQ ID NO: 5565 - DNA, 118 bp, homo sapiens
catccctgtgcccacagaaacatatgctgtatggaatcaaggtttaaggcatctaggcctgtgctggtaacctgtaaccttagccccatccctgtgcccacagaaacatgtgctgtat

SEQ ID NO: 5566 - DNA, 101 bp, homo sapiens
gctttaattcccctcccccagctgccctcaggagggcctgcagggaggacagtgcacagccactaaatacgctttaattcccctcccccagctgccctcag

SEQ ID NO: 5567 - DNA, 85 bp, homo sapiens
gaggaatggcgcgcactccagcctcacctgtaccttgtttagatctatttacgtagaggaatggcgcacactccagcctcacctg

SEQ ID NO: 5568 - DNA, 111 bp, homo sapiens
gcatcccccatagacttccccttcccaccaggctgactcgggggctacctggccctccttgtgggcgctggccagggctgacccggcatcccccacagacttccccttccc

SEQ ID NO: 5569 - DNA, 148 bp, homo sapiens
ctgcaggtgactgtgcctggagccccagcccccggcctcagtgctttcccacagagcctggcagaccccccagggcctgagtgaggtccaggcgtctcaggggactgcaggtgactgtgcctggagccccagcccccagcctcagtgc

SEQ ID NO: 5570 - DNA, 106 bp, homo sapiens
cccctcaccccaggactgagggagcccctcaccccatgaccgagtgaacccctcatccccctgaaccaggtgagcccctcaccccaggactcagggagcccctcac

SEQ ID NO: 5571 - DNA, 92 bp, homo sapiens
gggacagctccaccgcacaactcgaagatgtttctaaagggaactagtttatgtgacgcgggacagctccaccgtacaactcgaagatgttt

SEQ ID NO: 5572 - DNA, 120 bp, homo sapiens
ggatccagacggacgcacagcacccagccagtcaacaaagacagggtgaccccaccacaaagagctggatcacaggaggccacagaccaggatccagacggacacacagcacccagccag

SEQ ID NO: 5573 - DNA, 109 bp, homo sapiens
gattttgccgtttctcttctctctggaagttacagactttccactttttggtcgttcttgcgtcttttgaattggttttattttgattttgccatttctcttctctctg

SEQ ID NO: 5574 - DNA, 111 bp, homo sapiens
gctgactgtcgaccgcaggggagatgtagctttaatcatgaaggctgctgtgtctgtgacagtaggatgtgcaggctgactgtccaccgcaggggagatgtagctttaatc

SEQ ID NO: 5575 - DNA, 96 bp, homo sapiens
ccttcacagagggttccagaggccagaaatgggaggtgctgtagcccacagagctgtgtctgccttcacagagggttccagaggccagaaatggga

SEQ ID NO: 5576 - DNA, 106 bp, homo sapiens
gccactgagagcctgggtgtgcacatgtacacacatgtgtacaaacacacagaaaatgcacatagcacacgagctatgagagccactgagagcctgggtgtgcaca

SEQ ID NO: 5577 - DNA, 114 bp, homo sapiens
ttttttttaatggagatggggtcttgcgattgtgccactgcactccagccttggcaatagagcaagaccccatctccaaatttcttttttttttaaatggagatggggtcttgc

SEQ ID NO: 5578 - DNA, 98 bp, homo sapiens
gggcagagaaatggttgctgtctggatccagtgtgcaatttctcaagtaaacgagcccgatctccttggggagggcagagaaatggctgctgtctgga

SEQ ID NO: 5579 - DNA, 123 bp, homo sapiens
aaatgtccatgaaatcgtcacaatttatgttcagagattgcagtaaagacaggcataagaaattataaaagtattaatttggggaactaacaaatgtccatgaaatcttcacaatttatgttc

SEQ ID NO: 5580 - DNA, 122 bp, homo sapiens
gcctctgggcagctagtgtgagctgtcgtcttgtgcagctggtctaggatggggcagaggctctgccttgacctctcccacccctggtgccgcctctgggcagctggtgtgagctgtcgtct

SEQ ID NO: 5581 - DNA, 94 bp, homo sapiens
ttgacctggtgtcctgtgatgttttaaattagtcatcagtagtatatagaaatacaactgatctttacacattgacttggtgtcctgtgatgtt

SEQ ID NO: 5582 - DNA, 81 bp, homo sapiens
gttttgtttttgaaatggagtcttttttttagtggttttttgttttgttttgttttgttttgtttttgagatggagtcttt

SEQ ID NO: 5583 - DNA, 80 bp, homo sapiens
aatgagtgtattaaaggtgagaaattcccaaagtcaaactcagtagcatccttgaatgagtgtattaaaggtgataaatt

SEQ ID NO: 5584 - DNA, 276 bp, homo sapiens
aggtacactataatgtgtacatgcatagcatgtacacacatctgtacagtgtacatgcatatgtacactataacacatgtacatgcatctagcacacaatctatatgcatacaatgtacatataggtacactataacatgtatgtacatgaataaagcacagccatagccaatgtacatatacaggtacactataacatgtatgtacatgaatagcatgtacacgcatctctatccagtgtacacaggtatactataacctgtatgtacatgcata

SEQ ID NO: 5585 - DNA, 236 bp, homo sapiens
agctagatacagagtgtggacacaaaggttctccaagtccccaccagagtagctagatacagagtgtcgattggtgcattcacaaaccctgagctagatgcagggtgctgattggtgtgtttacaaaccttgagctagatacagagtgccgattggtgtatttacaatcccttagctagacataaaggttctccaagtccccaccagagtagctagatacagagtgccgattggtg

SEQ ID NO: 5586 - DNA, 184 bp, homo sapiens
cctgacaccctcagacacccgggacaatacggggctgcagggaacgcaaggctgtgttgaacgcatcggacctgacaccctcagacacccgggacaatacggggctgcactgaacgcaaggctgttttgaacgcatcggacctgacaccctcagaaacccgggacaatacggggctgcactgaa

SEQ ID NO: 5587 - DNA, 99 bp, homo sapiens
aaactgtgccaatcaaacaccagagaccatgagaacagccgtgtgtgggagggggcggaaacaaactgtgccaatcaaacaccagagaccatgagaaca

SEQ ID NO: 5588 - DNA, 113 bp, homo sapiens
ggtgctgggaacaagctgctccatcttatcccaggtccttcaatcccaaagcaggggctccccactgcaccagcacacagtggtgctgggaacacgctgctccatcttatccc

SEQ ID NO: 5589 - DNA, 88 bp, homo sapiens
aaagctcagagagaggtgtaatgaggaggctgctcaaccagtcaatatgcagcatgagaaaggaaagctcagagagaggtgtagtgag

SEQ ID NO: 5590 - DNA, 89 bp, homo sapiens
cgccgcagtctcctcccagcccacgcttcggcatggagagcagcttggagaggacagggccgccgcagtctcctcccaacccacgcttc

SEQ ID NO: 5591 - DNA, 92 bp, homo sapiens
accacccagaggcaaggccgtatgaaggagggcgtgggatcttggcccctgtgacaacctcaccacacagaggcaaggccgtatgaaggagg

SEQ ID NO: 5592 - DNA, 83 bp, homo sapiens
gtacccagcaaatactcagggctcacatcactgagaaggaaggaaggttgacagcgaagtacccagcaaatactcaggcctca

SEQ ID NO: 5593 - DNA, 151 bp, homo sapiens
aggtacactataacacatgcgtacatgcatagagcatacacatccaaatagtgtacaaacatgtgcactgtaacatgtacatgcatagagcaaacatccagatccatagtgtatgtacgtaagtgcagtataacatgtatgtacacatagt

SEQ ID NO: 5594 - DNA, 90 bp, homo sapiens
tccaccttaaagacgacggcccagggtgttcggatgctccggagcgaccccacaagccctgtccaccttaaagaggacggcccagggtgt

SEQ ID NO: 5595 - DNA, 210 bp, homo sapiens
gtccacctaggctgctgtaacaacacaccataggctgggcgggggctgacaagcaacagaaaattcacaacctgccttcgtccacctaggctgctgtaacaacacaccataggctgggcggggactgacaaacaacagaaaattcacaacctgcctttgtccacctaggctgctgtaacaacacaccataggctgggcgggggctgacaa

SEQ ID NO: 5596 - DNA, 115 bp, homo sapiens
tttacttgtctcacttgtaggcccagaggggagacagtgtgtgccccttatagtacttggcagactgttgtgaccacccatttacttgtctcacttgtaggcccagaggggagac

SEQ ID NO: 5597 - DNA, 73 bp, homo sapiens
gcgtgggattcaggatggccttgtaggtcagtgttaactgtattctgactgcgtgggattcaggacggccttg

SEQ ID NO: 5598 - DNA, 94 bp, homo sapiens
ttttaaattctctgctatagaccaagatatgttatgattacattgattgacagttgttgttggaatggattttttaaattctctgccatagacc

SEQ ID NO: 5599 - DNA, 91 bp, homo sapiens
aaggtcatataggaagcactatggaatatgtaggaggtgctcagtctgttttgtgaagattgtatgccaaggtcatatgggaagcactatg

SEQ ID NO: 5600 - DNA, 153 bp, homo sapiens
gtctcctccttgtgcctgtgcgtctgagagaactggggcgtctccttgaactgggacgtctcctcctcgtgcctgtgtggtctgagagaactggggcgtctcctccaactggggcgtctcctcctcgtgcctgtgcgtctgagagaactgcgg

SEQ ID NO: 5601 - DNA, 76 bp, homo sapiens
tccctcccatcttaaataaaatcgactaattaatgtcacgccagaagcaggcttccctcccatcttaaataaaaac

SEQ ID NO: 5602 - DNA, 99 bp, homo sapiens
gtgcctttccttgctgagcccccggatcacgggggagcccttgacagggggctgggtagtttctagtgcaggagacatgcctttccttgctgagccccc

SEQ ID NO: 5603 - DNA, 71 bp, homo sapiens
tatacataacaggatgattagaaagacttgctgtaaaaagacttgatatacataacaggatgatatacata

SEQ ID NO: 5604 - DNA, 77 bp, homo sapiens
aaaactgcttattggttcccatgctggctacctgggcaataaaatcatttgaaaactgcttattggttcccgtgctg

SEQ ID NO: 5605 - DNA, 97 bp, homo sapiens
gagagatgctcttgccatggctcaccttggaggggtggcctctcacctccaggctaggtttggagagatgatcttgccatggctcaccttggagggg

SEQ ID NO: 5606 - DNA, 89 bp, homo sapiens
gacagcctgttcttttgtgtctgattaaagttcggttgttgtgggtggtggtcaggtgaggacagcctgttcttttgtgtccgattaaa

SEQ ID NO: 5607 - DNA, 125 bp, homo sapiens
ttcctccatctcttctcagggcttcataactcctttctttttggtgagactggcttctttcacttagcaatgtgcatttaagattccttcatctcttctcagggcttcataactcctttcttttt

SEQ ID NO: 5608 - DNA, 116 bp, homo sapiens
ccttgaagcccagtgatggagctcagaccctgtagccccaccgcctgcactatgattcctgaggaaagcatggggatccttgaagcccagtgatggagctcagaccctgtagcccc

SEQ ID NO: 5609 - DNA, 93 bp, homo sapiens
catttgtctgatgattgcaatattcagtgaaaacactgatgcccctgcccgtgccctgagactctacttccatttgtctgatgattgtaatat

SEQ ID NO: 5610 - DNA, 103 bp, homo sapiens
actttgtaacttcacttcggcctctgattggtcactttctgcaaccaatcagatgtttgcatagggtgtgactttgtaacttcacttcagcctctgattggtc

SEQ ID NO: 5611 - DNA, 98 bp, homo sapiens
ataacccatatatgcatataatctatatctgtaactatataggtatctctacatgtttacattatatgtatatatataacctatatatgcatataatc

SEQ ID NO: 5612 - DNA, 101 bp, homo sapiens
gagggtgggggagacctagggtaggtgaaggtgaacaatgctgccttctaagaccttccttctaagggagggtgggggagacctagggtaggtggaggtga

SEQ ID NO: 5613 - DNA, 86 bp, homo sapiens
gcaccgcccacggcactgggactggacccactcaggggtcagaggcggctgtgctcccacgcactgcccacggcactgggactgga

SEQ ID NO: 5614 - DNA, 99 bp, homo sapiens
ccctcagaaggaagtccaggatgactggtttagcttccggggtgactgacgctagtcccagacccctcagttgtggccctcggaaggaagtccaggatg

SEQ ID NO: 5615 - DNA, 82 bp, homo sapiens
agaaagtttggaacttcctagagacttggagaactcagaagacagaaagatgtaagaaagtttgaaacttcctagagacttg

SEQ ID NO: 5616 - DNA, 105 bp, homo sapiens
tagaagcctgtgtttctcctgatgtgtgttttatgcttaaaaattgtaaataatccatttttaagtgtgtatattctttagaagcccgtgtttctcctgatgtgt

SEQ ID NO: 5617 - DNA, 102 bp, homo sapiens
ggagggaggggatggtgaggagggggaggctgcctggactccagggagtaaacactgcaaaatgggagtgggagggaggggatggtgaggaggggaggctgt

SEQ ID NO: 5618 - DNA, 86 bp, homo sapiens
tcccagagtgctgagattacaggtcttgaactcctgatctcaggtgatccactggccttggcttcccagagtgctgggattacagg

SEQ ID NO: 5619 - DNA, 242 bp, homo sapiens
gaaaaaaaaggaaagaaagagaaagaaagaaagaaagaaagaaagaaagaaagaaagaaagaaagaaagaaagaaagaaggaaggaaggaaggaaggaaggaaggaaggaaagaaagaaaggaagaaagaaagaaagaaaaagagagagaggcaggcagaaaggaagggagggaggaagaaagagaaaaaaggaaagaaaggaaagggaagaaacaaggaaaggaaggaaggaaggagggaa

SEQ ID NO: 5620 - DNA, 101 bp, homo sapiens
gtataggccatactatatatacaaagtaaatcatgaatcattaaacactaaacattactattacgtataggccatactacatatacaaagtaaatcatgaa

SEQ ID NO: 5621 - DNA, 110 bp, homo sapiens
taattcaaaagtaaggaaatacagctcgttagtgaaatgtcctaatagatacataggtgtacagcataaacagataattcaaaagtaaggaaatacagctcattagtgaa

SEQ ID NO: 5622 - DNA, 83 bp, homo sapiens
atggtccagcatcacttattaaatattttatcattttgttttttatctaagaaaagtcacatggtccagcatcatttattaaa

SEQ ID NO: 5623 - DNA, 158 bp, homo sapiens
agctagatacagagtgtcaacacaaaggttctccaagtccccaccagagtagctagatacagagtgtcgattggtgcattcacaaaccgtgagctagacacagggtgctgattggtgtgtttacaaaccgtgagctagatacagagtgccgattggtg

SEQ ID NO: 5624 - DNA, 108 bp, homo sapiens; identical to SEQ ID NO: 3590

SEQ ID NO: 5625 - DNA, 82 bp, homo sapiens
taacacaatacaaaaaattaaaacattaaattttaaacaatacaattgtaacaattgtaaacaatacaaaaaattaaaacat

SEQ ID NO: 5626 - DNA, 99 bp, homo sapiens
acatcagaactccaagccttctgatctttgaacttgttcacgagtgccttctacccctggacgtcagaaacatcagaactccaggccttctgatctttg

SEQ ID NO: 5627 - DNA, 101 bp, homo sapiens
gattcataaggaactacttatgaatactatcttatgaatactactgatgaatactacttatgaatacttaaaggattcataaggaactacttatgaatact

SEQ ID NO: 5628 - DNA, 112 bp, homo sapiens
tagtactaggcacagtgctctccctgatccagtcacagtaatggtcgtcattccctgggtgctagacacagtgctgtagtactaggcatagtgctctccctgatccagtcac

SEQ ID NO: 5629 - DNA, 89 bp, homo sapiens
ccacttttctgggggaggggcaagaacctcaacccgttctctctgtgtctctaccccttctccacttttctgggggaggggcaagaacc

SEQ ID NO: 5630 - DNA, 113 bp, homo sapiens
gacaccccgaggggaaggccctgttgctgtagctgctggttcagtcgcttggaaggaagttcctatcgcccgaccctggggaatggacaccccaaggggaaggccctgttgct

SEQ ID NO: 5631 - DNA, 98 bp, homo sapiens
tgtattggcagatgtatttcagtgaacatagcacagcaaaccatatgactttggcctagccacttaatgtattggcaaatgtatttcagtgaacatag

SEQ ID NO: 5632 - DNA, 131 bp, homo sapiens
agatttgttagaaataaaaccaggtgcacactttcctcaggcttcccagagcgcttctaagagtcatcattgtgtaagatagcagatttgttagaaataaaaccaggtgcacactttcctcaggcttccca

SEQ ID NO: 5633 - DNA, 109 bp, homo sapiens
aagagaccttaatccaatagaaaattttaatatgcaatatgtataacataagttttatctgagggttggaagagaccttaatctaatagaaaattttaatatgcaatat

SEQ ID NO: 5634 - DNA, 81 bp, homo sapiens
atagcagacaggaatatttaaaaaaaaattaaataagaaagtccctggatccttcgatagcagacaggaagatttaaaaaa

SEQ ID NO: 5635 - DNA, 82 bp, homo sapiens
gaaacccctgtctctactaaaaatacaaaaattagcccaacattcctggctaacatggtgaaaccccgtctctactaaaaat

SEQ ID NO: 5636 - DNA, 110 bp, homo sapiens
gcctcccaaagtgctgggattacaggcttgagccactgcgcctggccggtctcgatctcttgaccccgtgatccgcccgccttggcctcccaaagtgctgggattacagg

SEQ ID NO: 5637 - DNA, 85 bp, homo sapiens
tcaggtcacttattttttagaatatccctaatttttttagaatatccttagtttttagaaaataaggtcacttattttttagaat

SEQ ID NO: 5638 - DNA, 88 bp, homo sapiens
agccaaaaggtagaaacaacccaaggcacttgtacacccacatttatagatgtgttattcataatagccaaaaggtggaaacaaccca

SEQ ID NO: 5639 - DNA, 130 bp, homo sapiens
gcttttggacctgggaaaatcttccttagtttctttatctgcccacattctcctttgttcctgttgcatggaaatgaagggaaaacaagcttctggacctgggaaaatcttccttagtttctttatctgc

SEQ ID NO: 5640 - DNA, 113 bp, homo sapiens
acaatattcttcacaaggacatatgaaatattttctgaaaacctattagttcatagggaatggtggacagtcatacaatattcttcacaaggacatatgaaatgttttctgaa

SEQ ID NO: 5641 - DNA, 101 bp, homo sapiens
aggtgggctcagacgggcttctctgaaccacaccattgttccacagctggtcccctaaacatacaaggtgggctcagacgggtttctctgaaccacaccat

SEQ ID NO: 5642 - DNA, 75 bp, homo sapiens
tgctatctttaactctctgtacctatcagcactgtgtgagcatttaacccatgctgtctttaactctctgtacct

SEQ ID NO: 5643 - DNA, 96 bp, homo sapiens
gtaaggcaccaaaggttaaactaaagtgagacatatctgctcactttatgtgagcagctttatgtaaggcaccaaaggttaaactaaagtgagaca

SEQ ID NO: 5644 - DNA, 85 bp, homo sapiens
taagagtttgcacttgcccaaatttcaatgctgcattttttattttaataaagttgtttaagagtttgcacttgcccaaatttca

SEQ ID NO: 5645 - DNA, 136 bp, homo sapiens
tatatacagtattgctaatacataatatacatatattgctattatatatatcatattatatacatatcatattgctattacatatcatagctatacatatcatattgctattacatatcatattgctattacatat

SEQ ID NO: 5646 - DNA, 146 bp, homo sapiens
caccaccagctgccacacactgcaggagcctactgagagcgagcacaggctggcccaggatgatgaacccattcctctgctaggttcccgccacaccaccagctgccacacactgcaggagcctactgagagtgagcacaggctgg

SEQ ID NO: 5647 - DNA, 80 bp, homo sapiens
taagcactgtttagaattttttttttttttggtaaactctctacttatctgcaggtaagcactgtttagattttttttta

SEQ ID NO: 5648 - DNA, 97 bp, homo sapiens
ttagtgatattaaggatctgtaaaactattgccaacaatgtgaatgaaacaaaattcaaacatggatatattttagtgatactaaggatctgtaaaa

SEQ ID NO: 5649 - DNA, 94 bp, homo sapiens
aaagtccttctcccatgtcacagtttatagaattctgggtgaagattatatagaagaaagagaaaaagtccttctcccatgtcacaggttatag

SEQ ID NO: 5650 - DNA, 84 bp, homo sapiens
tttttattctgcactaaatttatctttatagataaatgtaactgtaacttacatgtttttattctgcactgaatttatctttat

SEQ ID NO: 5651 - DNA, 97 bp, homo sapiens
tacaatattgaggcacagtactaaaaagattctatattaaaattaattataataaataatatctgtatacttacaatattgaggcacagtactaaaa

SEQ ID NO: 5652 - DNA, 80 bp, homo sapiens
attattttttgtagagacagggtcttggtttttatttattcagtcaaattttttaattttttttgtagagacagggtctt

SEQ ID NO: 5653 - DNA, 103 bp, homo sapiens
acacaccatatatatatatatatatatatatatatatatatatatatatatatatatatatggtgtgtgtgtgtgtgtgtatatgtatatatatatatatata

SEQ ID NO: 5654 - DNA, 117 bp, homo sapiens
ttgtcaccaatagacttacttttcaagaactgttaaagtaaattatttagagaggagaacttctgaatcaaacaaaaatgtaaaaattgtcaccaataggcttacttttcaagaact

SEQ ID NO: 5655 - DNA, 95 bp, homo sapiens
tttcttttctgccaaatttaatctgctgtaaaattatttcaccatgtacacattgaaataattgtattttttttcttttctgccaaatttaatct

SEQ ID NO: 5656 - DNA, 105 bp, homo sapiens
tgatgattcctacctgaatcaattatggggcgcatatcatgttccttaacaactctacccaatggtctcatcatccactgatgatccctacctgaatcaattatg

SEQ ID NO: 5657 - DNA, 156 bp, homo sapiens
tatatgtataatatataatggctaactttcattgagtttgagatatatatattatattttatatatataatatatatattatatattatatatattatatatttttatatattatatatattttatatattttatatattatatatattttatata

SEQ ID NO: 5658 - DNA, 104 bp, homo sapiens
tcaatataatgattgcacttaggatcaattataatgatcaatatatgtatatataaggatatgtatatatatatatggatcaacataatgattgcacttaggat

SEQ ID NO: 5659 - DNA, 95 bp, homo sapiens
taactttgtaacttcacttcagcctgtaattggttgcttcctgcaaccaatcagatgttggcacagggtgtaactttgtaacttcgcttcagcct

SEQ ID NO: 5660 - DNA, 124 bp, homo sapiens
ctttgtaacttcacttcagcctctgattggttactttccgcaaccagtcagactgatttgcaggacaagacttcatttgcataggagtgtaactttgtaacttcatttcagcctctgattggtt

SEQ ID NO: 5661 - DNA, 110 bp, homo sapiens
aagtgcccgtctcgcttactgcaggatatgtgaacagattatcaggctctcagagaacacacaccatcaatgaagtgcccgtcttgcttactgcaggatatgtgaacaga

SEQ ID NO: 5662 - DNA, 125 bp, homo sapiens
gtgaagatttcatggacatttatcagttccccaaattaatacttttataatttcttacgcctgtctttactgcaatctctgaacataaactgtgaagatttcatggacatttatcacttccccaa

SEQ ID NO: 5663 - DNA, 113 bp, homo sapiens
tcaagtgatcctcctgcctcagcctcctgagtagctggcacaagcacatgccaccatgcctaattttttttcataaacacctggcttcaagtgatcctcctgcctcagcctcc

SEQ ID NO: 5664 - DNA, 101 bp, homo sapiens
actaaaagtaattccttgtgactctcactgagaaggatgactttactaaattactaaaagtgatgaattactaaaagtaattcctagtgactctcactgag

SEQ ID NO: 5665 - DNA, 96 bp, homo sapiens
tttacaaacctttagttagacacagagcgcagattggtgtgtttttacaaagtgctgattggtgcatttacaaacctttagctagacacagagcgc

SEQ ID NO: 5666 - DNA, 102 bp, homo sapiens
attgcagtttttgccactgaaagtaaagcatctgtgcatatttctttaaatctaaactattaggttggcacaaaagtaattgaagtttttgccactgaaagt

SEQ ID NO: 5667 - DNA, 104 bp, homo sapiens
caaacaatacgcatgctgacagccattatctgtggcctctgatgctattagccaaaccatgttattgatggtcaaacaatacgcatgctgacagccattatctg

SEQ ID NO: 5668 - DNA, 101 bp, homo sapiens
aaacgttctccaagtccccaccagattagctagacacagagcgctgattggtgcttttacaatcctttagctagacagaaaagttctccaagtccccacca

SEQ ID NO: 5669 - DNA, 114 bp, homo sapiens
atttccaaaaattctcatttgtagcagtggtgacatcttactggttcgctcattaataagttaaaaaactctttggcgtgttcatttctaaaaattctcatttgtagcagtggt

SEQ ID NO: 5670 - DNA, 91 bp, homo sapiens
ctcattttaagtaaactgaagaaagcaaaattttattttaaatttcatttgaaattttattttacatctcattttaagtaaagtgaagaaa

SEQ ID NO: 5671 - DNA, 71 bp, homo sapiens
tggtgaaatacactgtcgcatttacttttatgttgcaaatgtgtttactggtgaaatacactgtcgcactt

SEQ ID NO: 5672 - DNA, 138 bp, homo sapiens
gattaatatggtttaagaagatgtgtatgggtgcgaagtttattattttattattgttatttggagattaatatggtttattattgttgttatttggcgattaatatggcttaagaagatgtgtatgggtgcgaagtt

SEQ ID NO: 5673 - DNA, 98 bp, homo sapiens
gaatcccccatctatagtgtggcatcgttcagctctcccacagcgtaaggtacatgtaaggatgagaatgaatcccccatttatagtgtggcatcgtt

SEQ ID NO: 5674 - DNA, 99 bp, homo sapiens
tgaaggaataaaggacagtagcagaataaagcttgttactttattccttggtgaaggaacttttttccttggtgaaggaataaagggcagtagcagaat

SEQ ID NO: 5675 - DNA, 103 bp, homo sapiens
tcaacttaaattttgaggataaattgaggttatgaacaagctttcacatttcttaaatgtgaaatttttcaacttaaattttgaggataaagtgaggttatga

SEQ ID NO: 5676 - DNA, 100 bp, homo sapiens
aaagcattttggcctctttgacatagaagtcaacttttaaaacctgaagtcagcttctaaacccaatttagaaagcattttggcctcttggacatagaag

SEQ ID NO: 5677 - DNA, 130 bp, homo sapiens
acattatttacagaaaaaggaaaataaatggtcaacacacatctgaaaaaaattcaaaacaaaattatgtaacagataaactagacaaacattatttacagaaaaaggaaaataaatggtcaacacacat

SEQ ID NO: 5678 - DNA, 97 bp, homo sapiens
aatagtctatgtaaatttcagagtaatttcaaacttcttctgtaagcaggtaactcaaaggcaacatccaaatagtctacgtaaatttcagagtaat

SEQ ID NO: 5679 - DNA, 153 bp, homo sapiens
tttctcttccttccttccttcctttctttcttttttctttctttctttctttctttctttctttctttctttctttctttctttctttcttctttctttctttctttctctctctctctctctctctctctttctttctttctttcttccttt

SEQ ID NO: 5680 - DNA, 90 bp, homo sapiens
aacttaatgaagttgtacaataatagctttttcagtagaatattttaaagaagttgaagaacttaaagaagttgtacaataatagctttt

SEQ ID NO: 5681 - DNA, 134 bp, homo sapiens
taatatacttaatataacatatatagttatattaatatactgaatataacatatatagttatattaatatactgaatataacatatatagttatattgagtaatatactgaatataacatatataacatttatt

SEQ ID NO: 5682 - DNA, 124 bp, homo sapiens
tcctgaaaagaaaatagatcagtgtagcctgagagaacaggagaagactaaatactgttaagattccatttaaatgtaatatcctgaaaagaaaatagatcagtgtagcctgagagaacaggag

SEQ ID NO: 5683 - DNA, 97 bp, homo sapiens
agaaataacccttctcatataccttacagtatatgaaataacccttcccatgtaccatattgtcaaatggtgccagaaataacccttctcatatacc

SEQ ID NO: 5684 - DNA, 110 bp, homo sapiens
gtcctctttgtggtctcagaggaaagggaagagtgcaggtttttgagaatgcattggtaagggccactaaatctgaccttcctcagtcctctttgtggtctaagaggaaa

SEQ ID NO: 5685 - DNA, 84 bp, homo sapiens
aattctattatctttcctattccctttcctattcccttggatttcctattccctttcctattcccttggatttcctattccctt

SEQ ID NO: 5686 - DNA, 111 bp, homo sapiens
cacacaataataatgggagactttgacaccccactgtcaacaagagacctacaaagagacttagactcacacacaataataatgggagactttaacaccccactgtcaaca

SEQ ID NO: 5687 - DNA, 106 bp, homo sapiens
tcccactgatagtgtataagcattcctctttttttgggaaatctctgagctgatttccacaggggctgaactaatttataatcccactaatagtgtataagcattc

SEQ ID NO: 5688 - DNA, 102 bp, homo sapiens
gatttcatcctctcactttttgatgaagaattgctcaatgtcagaactaaatagaaccccgcagatcagtggattttatcctctcactttttgatgaagaat

SEQ ID NO: 5689 - DNA, 93 bp, homo sapiens
aggttctattgtaacagcatgatggatatgaaccaaggttctattgtaacagcatgatggatatgaattgaggttatattgtaacagcatgat

SEQ ID NO: 5690 - DNA, 94 bp, homo sapiens
gacctcgtgatccacctgccttggccttccaaagtgctaggattacaggcaagagccactgcgcccagacctcgtgatccacccgccttggcct

SEQ ID NO: 5691 - DNA, 89 bp, homo sapiens
cattatggagtcccttgctaggaaaataagtactagaggtgagggacttattttctagggggttgcattatggagtcccttgctaggaa

SEQ ID NO: 5692 - DNA, 103 bp, homo sapiens
cttcagtttttacctgaaatatcttgaataagatattcaagagttggcttttctaccttctaccttctacatgcttcagtttttacctgaaatatcttgaata

SEQ ID NO: 5693 - DNA, 73 bp, homo sapiens
tagataaatgggaattttctattctttgagctttccagttgttttatttctagataaatgggaattttctgtt

SEQ ID NO: 5694 - DNA, 122 bp, homo sapiens
agcacccatcactaaagcctggttctgaaaacagacaagccgactgcatggtggttccaaagagtttaaataaatcagcagagagagatggagcacccatcactaaagcctggttcagaaaa

SEQ ID NO: 5695 - DNA, 327 bp, homo sapiens
ccccaaccccttctctccgtgtctctaccacttcccccttttctagagggcaagaaccccccaaccccttctctctgtgtctctaccccttctctgcttttctgggggcaagaacccccgatctcttatttccgcaccccaacctcttatctctgtgccccgatcccttatttccgctccccgacctcttatctccgtgccccaatcccttatttccacaccctgacctcttatctctgcgccccaaccttatttccatgccccgacccctttcccgcttttctggagggttagaacccctgaaacccttccctccgtgtctctact

SEQ ID NO: 5696 - DNA, 102 bp, homo sapiens; identical to SEQ ID NO: 2433

SEQ ID NO: 5697 - DNA, 94 bp, homo sapiens
ttccataaggtaagtgtgtaaaaaccgtggcaaaatgcttgtaatttaaaagagggggtttctatcaggcttctataaggtaagtgtgtaaaaa

SEQ ID NO: 5698 - DNA, 97 bp, homo sapiens
aggcttccataaggtaagtgtgtaaaaaccatggcaaaatgcttgtaatttaaaagagagggttattatgaggcttctataaggtaagtgtgtaaaa

SEQ ID NO: 5699 - DNA, 154 bp, homo sapiens
ggtgacagagtgagacccagtctcaaaaaataaaataaaagagctcaaaagcttcgtaggtctaagctgcaatgagccatgattgtgtcactgcactccagcctgggtgacggagtgagacccagtctcaaaaaataaaataaaagagctcaaa

SEQ ID NO: 5700 - DNA, 110 bp, homo sapiens
gtgtgttatgtgagatcctccagggaacttggaagtgcatctgtgtgtgtgtgtatgtgcatgtgtgtgtgtgagagtgtgtgcgtgtttatgtgagatcctccagggaa

SEQ ID NO: 5701 - DNA, 96 bp, homo sapiens
tatttgggttactgccagaccatctgcagagaaagtttcaggcatgacaatgcccatcctatatttgggttactgccagaccatctgcagagaaag

SEQ ID NO: 5702 - DNA, 92 bp, homo sapiens
gcttgttttttcactaacaatgtgtcttagagatggcttgaaccatgtctggcatattatatttctgtagcttgctttttcactaacaatgt

SEQ ID NO: 5703 - DNA, 76 bp, homo sapiens
cacaaaagaagtgaaaatggcctgttcctgccttaactgataacattccaccacaaaagaagtgaaaatggccggt

SEQ ID NO: 5704 - DNA, 121 bp, homo sapiens
aaaattaataaatattgaaaaccataacatcccgtttctttattgctagagataggacaaaaaatcaaagatatgacaataatattaaaaattaataaatgttgaaaaccataacatcccg

SEQ ID NO: 5705 - DNA, 128 bp, homo sapiens
taaaagtgtgtggcacctctccctctctctccctccctccgcctccctccccctccctccccctccctccctctccctccctctccctatctaaaagtgtgtggcacctctctctctctctccctccc

SEQ ID NO: 5706 - DNA, 160 bp, homo sapiens
atattcctagaaatggtaacacctagaaatattaacttttcaaattttgtcctatttgcttgtggtattttaatttgagaaagtataaaggatgatgtaacaaaaacctatattcctagaaatgttaacacctagaaatattaacttttcaaattttgtc

SEQ ID NO: 5707 - DNA, 154 bp, homo sapiens
gctctgaggtcaggaggggcagggtatcggagctgtgaggtcaggagggggcaggtgtcccctgggtgtgtggagctgtgaggtcaggaagggcagtttcccctgggtaggagaggggctgtgaggtcaggagggggcaggtgtcccttgggtg

SEQ ID NO: 5708 - DNA, 95 bp, homo sapiens
tgctgctagcgcatccgctttcaaactacatctgagcactccacaccttcttctaggaggttccccagattgctgctagcgcatctgctttcaaa

SEQ ID NO: 5709 - DNA, 119 bp, homo sapiens
ctttcccccatgtatctccttaatgcatcttaatacatcttaatacatctcccccatgtatctgctttcccccatgtatctccttatctccccatgtatcccccaggtatctccttaat

SEQ ID NO: 5710 - DNA, 126 bp, homo sapiens
actgtgattctcatgagtggggctctagcagtcccgcctctgttctgcgggcatggaaggaagccccaggaagctgggaaatgactgtgattctcatgagtggggctctagcagtcctgcctctgt

SEQ ID NO: 5711 - DNA, 106 bp, homo sapiens
ctctttcctttataaattacccagtctcaggtatttcttcaatgcagaactgtgagtcaactgaaactctttcctttataaattacccagtctcgggtatttcttc

SEQ ID NO: 5712 - DNA, 109 bp, homo sapiens
ccttagtatctacattaaaaaagtaaaaagaaataagtgagctcattgtagataccattcctaatatagatactatcccttagtatctacattaaaacagtaaaaagaa

SEQ ID NO: 5713 - DNA, 381 bp, homo sapiens
cccattttacagagagctgattggtccattttatggagagctgattagtccgttttacagagagctgattggtccattttgacagggtgctgattggtgcgtttacaatccctgagctagacacagaatgctgattggagtatttacaatcctctagctagatgtaaaagttctccaagtccccactagattagctagacacagagcactgattggtgagcttacaaaccttgagctagacacagggtgctgattggtgcgtttacaaaccttgagctagacacagagtgctgattggtgcatttacaatcctttagctagacataaaagttctccaagtccccaccagattagctagatacagagtgctgattggtgcat

SEQ ID NO: 5714 - DNA, 237 bp, homo sapiens
ttagctagacacagagcgctgattggtgcattttttacagagtgctgattggtgcatttacaaacctttagctagacacagcgcgctgattggtgcacttacaatcctttagctagacagaaaagttttccaggtccccacctgattagctagacacagagcgctgattggtgtgtttttacagagtgctgattggtgtgtttacaagcctttagctagacacagagcgctgattgg

SEQ ID NO: 5715 - DNA, 110 bp, homo sapiens
aagtatttgcagatccaagtccttttgcaagagagtcacgggaatcccggggatagagtctagctcagagattcagtaagtatttgcagatccaagtccttttgcaagag

SEQ ID NO: 5716 - DNA, 108 bp, homo sapiens
caccaatcggcactctgtatctagctcacggtttgtaaacacaccaatcagcaccctgtgtctagctcaggatttgtgaatgcaccaatcgacactctgtatctagct

SEQ ID NO: 5717 - DNA, 100 bp, homo sapiens
cctcctgagtagctgagatcacaggcatgcaccactatgcccagctcttgggttcaagtgattcttgtgcctcagcctcctgagtagctgagattacagg

SEQ ID NO: 5718 - DNA, 125 bp, homo sapiens
gaacataaattgtgaagatttcatggacgtttattagttccccaaattaatacttttataatttcttatgcctgtctttacttcaatctctgaacataaattgtgaagatttcatggacatttat

SEQ ID NO: 5719 - DNA, 101 bp, homo sapiens
gtagtttgaaagcggatgcactagcagcaatctgggggacctgctagaagaaggtgtggagtgctcagatgtagtttgaaagcagatgcactagcagcaat

SEQ ID NO: 5720 - DNA, 74 bp, homo sapiens
tgctatcactacacaaccaatagacaaaaaaaaaaaaaaaaaaaccactatgctatcactacacaaccgataga

SEQ ID NO: 5721 - DNA, 104 bp, homo sapiens
aatacacttctattatgttacatataatattatatgtatatgtatatataatatacatatatatgttacatataatatacttctattatgttacatataatatt

SEQ ID NO: 5722 - DNA, 90 bp, homo sapiens
aatttcctcccagttcatttttagaccctcctgcacagggtcactggttcgaaggctgacttttgcaatttcctcccagttcctttttag

SEQ ID NO: 5723 - DNA, 156 bp, homo sapiens
agcctctgcagatgaaggcccaaacatgttttccagtagcagggaacacaactgtcctcactccatcagtgaccttagagacagcggagtgcctcaaggggccattgtagcctctgcagatgatggcccaaacatgttttccagtagcagggaaca

SEQ ID NO: 5724 - DNA, 93 bp, homo sapiens
gtatggctatttaaataacattatttaaatattacaagtatgtatttagtacttgtatttaacattacaagtatggctatttaaataacatta

SEQ ID NO: 5725 - DNA, 100 bp, homo sapiens
agtctggggaagacttatagtgagaactggaaattaaatggtgcactggaaataaatcactgccctgttgttttcaagtctgtggaagacttatagtgag

SEQ ID NO: 5726 - DNA, 107 bp, homo sapiens
ataactcgattacaagactgctttagataactagattacatatataatccatatatagctagattacatctagttgcatacatataactagattacaagactgcttt

SEQ ID NO: 5727 - DNA, 108 bp, homo sapiens
caccaatcggcactctgtatctagctcaaggtttgtaaacacaccaatcagcaccctgtgtttagctcaaggtttgtgaatgcaccaattggcactttgtatctagct

SEQ ID NO: 5728 - DNA, 108 bp, homo sapiens
caccaatcagcactctgtgtctagctcaaggtttgtaaacacaccaatcagtaccctgtgtctagctcaaggtttgtaaatgcaccaatcagtgctctgtatctagct

SEQ ID NO: 5729 - DNA, 100 bp, homo sapiens
ataggacaactaactgaggaagaatctctcccgatcaacaaacctccagcatttccccaatcttcaagatagaacaactaactgaggaagaatctctccc

SEQ ID NO: 5730 - DNA, 131 bp, homo sapiens
tggtggcatgcacctatagtcccagctactcagggggcctgtctaacatggtgaaaccctctctatactaaaaatacaaaaattagctgggcatggtggcatgcgcctatagtcccagctactcagggggc

SEQ ID NO: 5731 - DNA, 82 bp, homo sapiens
ggtgacagagtgagaccctgtcttaaaaaaacagggcagaagaggtcagggggaggatgggtgacagagtaagaccctgtct

SEQ ID NO: 5732 - DNA, 134 bp, homo sapiens
ctaattttttgtatttttagtagagacagggtttcaccatgttggccaggctggtctcgaactcctaacctcagttgatcctcctgcctctaattttttgtatgtttagtagagacagggtttcaccatgttgg

SEQ ID NO: 5733 - DNA, 104 bp, homo sapiens
gcctgtaatcccagcactttgggaagccaaggcgggcagatcaccaggtcaagagatcgaggccagccatgatgactcacgcctgtaatcccagcactttagga

SEQ ID NO: 5734 - DNA, 82 bp, homo sapiens
ttttaaattattcctgtagaaaattggtagtatataagtgttttaatttattatgtgttttaatttattcctgtagaaaatt

SEQ ID NO: 5735 - DNA, 138 bp, homo sapiens
ttttgtgtctggcttatttctcttagcttaatcttttcaaagttctcttaatcttttcaaagtacaaatattgtactcatacaatatttgtccttttgtgtctggcttatttcacttagcttaatcttttcaaagttc

SEQ ID NO: 5736 - DNA, 101 bp, homo sapiens
gtctctactaaaaatacaaaaaattatcctcatctcaggagtttgggaccagcctggccaacatagtgaaaccctgtctctactgaaaatacaaaaaatta

SEQ ID NO: 5737 - DNA, 130 bp, homo sapiens
gagatcccatctctacaaaaagttaacacacacacacacacacattcaccaccttagcctggcttagtggcgggcgcccgtgttacaaagggagatcccatctctacaaaaagttaacacacatacacac

SEQ ID NO: 5738 - DNA, 100 bp, homo sapiens
ccatggtactcacggatctcttccgggtccacttctgatgaatttgggggaatgtcacttttccagccagtgtagtccatggtactcacagatctcttcc

SEQ ID NO: 5739 - DNA, 71 bp, homo sapiens
tggagtctgattttatatatatatatatatatatattcctatgtaaagtggagtctgattatatatatata

SEQ ID NO: 5740 - DNA, 186 bp, homo sapiens
agctagatacagagtgtcgattggtgcactcacaaaccttgagctaaacacagggtgctgattggtgtgtttacaaaccttgagctagatacagagtgccgattggtgtatttacaacccttgagctagacataaaggttctccacgtcctcaccagagcagctagatacagagtgtcgattggtg

SEQ ID NO: 5741 - DNA, 94 bp, homo sapiens
aactttagaactagagattacggaaaagttattagagtgaaatacccaaaagcattaggcaaactttagaactagagattacggaaaaggtatt

SEQ ID NO: 5742 - DNA, 112 bp, homo sapiens
ttaaccataacaaaaaccagcaatgtcacagcagaagattactgtcatgtggttttaagatggtagatgttattaaccataacaaaaaccagcaatgtcacagcagaagatt

SEQ ID NO: 5743 - DNA, 250 bp, homo sapiens
cagcaaaaggaagacctaggaagatcgcatgggagaaaaaagaagacacacctagggaaattatgagtcccgcaaaagaaacatctgagaaatttacgtgggcagcaaaaggaagacctaggaagatcgcatgggagaaaaaagaaacacctgtaaagactggatgcgtggcaagagtaacatctaataaaactaaagttttggaaaaaggaagatctaagatgattgcatgtcctacaaaagaatcatc

SEQ ID NO: 5744 - DNA, 104 bp, homo sapiens
tataatgataaaaggattaatccaacaggaagatcagtatccttttttgtctttaaaaaaaacaaagaagaatactgtataatgataaaaggattcatccaaca

SEQ ID NO: 5745 - DNA, 124 bp, homo sapiens
aacataaattgtgaagatttcatggacatttattagttccccaaattaatacttttataatttcttactcctgtctttactgcagtctctgaacataaattgtgaagatttcatggacatttat

SEQ ID NO: 5746 - DNA, 81 bp, homo sapiens
tcagaggaaatacagagagaaaaacccgctaccagcgggagaggagagatctgagtcagaggaactacagagagaaaaacc

SEQ ID NO: 5747 - DNA, 125 bp, homo sapiens
gaacataaattatgaagatttcatggacatttattagttccccaaattgatacttttgtaatttcttacatctgtctttactgcaatctctgaacataaattgtgaagatttcatggacatttat

SEQ ID NO: 5748 - DNA, 110 bp, homo sapiens
agaaacaagttatctactcccaaaatacaaaggtgagatcggcatgggataacagtgaacctgggaaattcgagaaacaagttatctactcccaaaatacaaaggtgaga

SEQ ID NO: 5749 - DNA, 95 bp, homo sapiens
ctatgtgaaggaaactataaaacttggtcaagatgtttacatgttctaaaaaacatacagaatgtgcaggctatgtgaaggaaactataaaagtt

SEQ ID NO: 5750 - DNA, 99 bp, homo sapiens
gcctccagcatccagggagagtgcaggtgggcagcacccagttctcttccttctcctcctgcctagggcggaccggcctccagcatccagggagagtgc

SEQ ID NO: 5751 - DNA, 72 bp, homo sapiens
aaggaatgtgtgtgcaggaaatatttaaatagaaaatagattagctacaaaggaatgtgtgtacaggaaata

SEQ ID NO: 5752 - DNA, 76 bp, homo sapiens
gttttgtttttgaaatggagtcttttttttagtggttttttgttttgttttgttttgtttttgagatggagtcttt

SEQ ID NO: 5753 - DNA, 125 bp, homo sapiens
ataagtgtccatgaaatcttcacaatttatgttcagagattgcagtaaagacaggcctaagaaattatagaagtattaatttggggaactaataaatgtccatgaaatcttcacaatttatgttc

SEQ ID NO: 5754 - DNA, 136 bp, homo sapiens
ttattaaaggaaattagccttatctcttattatattttattaaagaaaattattatattattcctttatatttttattaaaggaatttattattattattattaaaggaaattagccttatctcttattatatttt

SEQ ID NO: 5755 - DNA, 109 bp, homo sapiens
tctttttgtagaatctgcaagtggatatttggagtgctttgaggcctaatgtggaattgttttgatagagcagttttgaaacagtctttttgtagattctgcaagtgga

SEQ ID NO: 5756 - DNA, 97 bp, homo sapiens
atggtggaaaaggaaatatcttcacataaaaactagacataagccagtggatatttggagcgctttgatgctaatggtagaaaaggaaatatcttca

SEQ ID NO: 5757 - DNA, 205 bp, homo sapiens
cctctcacctccccatctccccaatcccactcacctcccatctccctatcccctccatccccatctctcccatccccttctcacctcctcatctccccccattccctctcacctcccatctctcccatcccctctaacctccatctttcccgtttctcctctcaccctcatctctcccgtcccccctcaactcccatctctccca

SEQ ID NO: 5758 - DNA, 299 bp, homo sapiens
ccccgtcacctccatctctcccatccccctctcactcccatttccccatcccctctcacctcccatctctcccatcccctcaactccatctctcccatctcccctaagctccatctttcccgtttctcctctcaccccccatctctcccaaccccctctcacctccatctcccccatccccctctcacctccatctcccccatccccctctcacctccttctcctcctgtctctcctctcacctccacatctcccctccccatctcccctcatccccctctcaccttcctgtcttccct

SEQ ID NO: 5759 - DNA, 99 bp, homo sapiens
gctccgccctgggcaggaggagaaagaagagggccaggcaccacgtgcctgcactctccctggatgctggaggctgctccgccgtgggcaggaggagaa

SEQ ID NO: 5760 - DNA, 92 bp, homo sapiens
gtcaagccctgctctagtcacacagctggaaggtgactagtctacgcatggctgaagcttaaggaaaagtcaagtcctgctctagtcacaca

SEQ ID NO: 5761 - DNA, 94 bp, homo sapiens
actataactacaaatgacctttttttttttgcatataaagtgcttaggaggacttgaaagtaattaatcactataactacaaatgacctttttt

SEQ ID NO: 5762 - DNA, 152 bp, homo sapiens
gtgtgcgtgcgtgtgaacgcgtcacactcttgtgtgaacgcgtcatacgcttgtgaaagacggtgcttgtgcacacgcgtgtgcgtgcgtgtgaacgcgtcagggtacccgaggatgcacacacgcacgtgtgagtgtgcgcgagtgcgtgc

SEQ ID NO: 5763 - DNA, 74 bp, homo sapiens
gtaagacaaatgctagtattgtatgctggtattgtattgtagtattgtactgtagacaaatgctagtattgtat

SEQ ID NO: 5764 - DNA, 125 bp, homo sapiens
ataaatgtccatgaaatcttcacaatttatgttcagagattgcagtaaagacaggagtaagaaattataaaagtattaatttggggaactaataaatgtccatgaaatcttcacaatttatgttc

SEQ ID NO: 5765 - DNA, 108 bp, homo sapiens
ttctaccacaagtcatccctcacagtacatcagagaacccacacaggagagaaaccctatgcatgtagtgaatgtgggaaaaccttctaccagaagtcatccctcaca

SEQ ID NO: 5766 - DNA, 135 bp, homo sapiens
gaacataaattgtgaagatttcattttaatatggacatatatcagttcccaaataatacttttataatttcttacacctgtctttacttcaatctctgaacataaattgagaagatttcattttaatatggacat

SEQ ID NO: 5767 - DNA, 97 bp, homo sapiens
gtgaatttcttaaatttctttacttttattgatttcctatatcattgtgattagaaaaatacgttgtgtagatttaaatttctttacatttattgat

SEQ ID NO: 5768 - DNA, 89 bp, homo sapiens
ttaaccaacacccttagctgtacatttttctgtttccatttttcggttttttaactttttaaccaacaccattagctgtacatttttct

SEQ ID NO: 5769 - DNA, 88 bp, homo sapiens
aaaaaaggtcatttgtagttatactgattaattaccttcaagtcctcctaagcactttatatgcaaaaaaaggtcatttgtagtcata

SEQ ID NO: 5770 - DNA, 89 bp, homo sapiens
ttgcccaattttaaattagaggtcaagtagtttttttagatctgcaatttagacctctaatttatgttgcccaattttaaattagaggg

SEQ ID NO: 5771 - DNA, 96 bp, homo sapiens
aaaagttgtatgtatgtaaatattagcaaaatattacaacttacaaaaagttacatacttacaaaaagttgtaagtatgtaaatattagcaaaata

SEQ ID NO: 5772 - DNA, 95 bp, homo sapiens
gaaaatcaatacagaaattaaaatgaataaaaaaggaaaaatgagactcataaaatgagggaaaatcaatacagaaattaaaattaataaaaaag

SEQ ID NO: 5773 - DNA, 89 bp, homo sapiens
tgtgtctctaccctctcttttctctccactttcctggggggcaagcacccccaccccttttctccatgtctctaccctctcttttctct

SEQ ID NO: 5774 - DNA, 91 bp, homo sapiens
ggacaatatagcaagatcccatccctacagaaaactacaaaattagttgggtgtggtggtgtgtgctgggacaatatagcgagatcccatc

SEQ ID NO: 5775 - DNA, 94 bp, homo sapiens
ctctacatgctgggcctactcagggaatcctggtgagagatggagttcccttctgcccctgtctctctctacatgctgagcctactcagggaat

SEQ ID NO: 5776 - DNA, 132 bp, homo sapiens
aatttgctgttatatttttatataaactatgtttatgacataagtataaacaaaaaaataaaataagtaaataaataaataaaatttagattaatttgctgttatatttttatataagctatgtttatgaca

SEQ ID NO: 5777 - DNA, 142 bp, homo sapiens
ttatataaaaatataacagcaaattaatctaaattttatttatttatttacttattttatttttttgtttatacttatgtcataaacatagtttatataaaaatataacagcaaattgatctaaattttatttatttattta

SEQ ID NO: 5778 - DNA, 122 bp, homo sapiens
atatgatggctgatttctgctcacaattatatgatggcggatttctgcctacattatgatatgatatgatatgatatgatatgatatgatatgatggctgatttctgcctacattatgatat

SEQ ID NO: 5779 - DNA, 101 bp, homo sapiens
tgtacgcacatgtgtgcatgtagtgtgggcttgtgtgtgcatgtgtgtgcacatgtgctggatgtgcgcttataaacgtatgtgcatatgtgtgcttgtgg

SEQ ID NO: 5780 - DNA, 119 bp, homo sapiens
tataagctaaagacctccaggaacatacatatagtataaggtgctaagaattgttttaggttctaagaattatttatgcttataagccaaagacctccaggaacatacatatagtataa

SEQ ID NO: 5781 - DNA, 93 bp, homo sapiens
cacacacagttactacatctccatgcacagggcaagttgatctcagtgggcgcccccatctgttctgacccacacacagttaccacatctcca

SEQ ID NO: 5782 - DNA, 123 bp, homo sapiens
ataaattgtgaagatgtcatggacatttatcagttcccaaaattaatacttttataatttcttacacctgtctttactgcagtctctgaaaataaattgtgaagatttcatggacatttatca

SEQ ID NO: 5783 - DNA, 112 bp, homo sapiens
aaatgcaccaatcagcactctgtgtctagctaaaggatcataaatgcaccaatcagcactctgtaaaatggaccaatcagcactctgtaaaatggaccaatcagcaggacgt

SEQ ID NO: 5784 - DNA, 108 bp, homo sapiens
taatccacatacgtgattttttaagtcaaggtttttatcttaacgtctaaaagattttaatgatgtttaatccacatacttgattttttaagtcaaggtttttatctt

SEQ ID NO: 5785 - DNA, 98 bp, homo sapiens
tataaagaggacaattatataggaacagataacttcaggaaactctttcaatatatcaacgggaatataagaatataaaaaggacaattatataggaa

SEQ ID NO: 5786 - DNA, 126 bp, homo sapiens
tgtgtgtgtgtgtgtgtgtgtgtgtctgtatcacattttccttatcctatctaccgatttatatttttttgggtatataccatggtgtgtattttgtgtgtgtgtgtgtatcacattttccttatc

SEQ ID NO: 5787 - DNA, 77 bp, homo sapiens
agatgtttggaaaatgccattttataatatgcatatttatagagaaatatagatagatatttggaaaatgccatttt

SEQ ID NO: 5788 - DNA, 121 bp, homo sapiens
acatacataagaacacatttactttcattttatttttctcctacagtatatcctgttgtaactgagaaagttattacatacataagaacacatttactttcattttatttttctcctacag

SEQ ID NO: 5789 - DNA, 90 bp, homo sapiens
atggtaaaatagtagttaaaaaataggaaatcttgaaagagctttatttttctttacagtgttgatggtaaaatagtagttaaacaatag

SEQ ID NO: 5790 - DNA, 82 bp, homo sapiens
taaatcctgccaccagatgcagctgtacaattgaagtacatcaacccacttgccactataaagcctgccaccagatgcagct

SEQ ID NO: 5791 - DNA, 77 bp, homo sapiens
aacatgcttctttatatttctggtgataaatctgtagagatgtaagacttcaaacaagcttctttatatttctggtg

SEQ ID NO: 5792 - DNA, 161 bp, homo sapiens
agagagggtagctcctctctgtaggcaggtcgtcccaatgagtgttcagttgtcaacagagagggtagctcctctctgcagctggtcatcccatcatctgcagctctcagcagagaggaggccctagagtgggtagctcctctctgcagctggtcatccca

SEQ ID NO: 5793 - DNA, 122 bp, homo sapiens
cataaattgtgaagatttcatggacatttattagtaccccaaattaatacttttataatttcttacgcctgtctttactgcagtgtctgaacataaattgtgaagatttcatggacatttat

SEQ ID NO: 5794 - DNA, 110 bp, homo sapiens
actccagttacatttatttactgaaacaaaactagtaataataggacttgcggattcctttttactctgccaatggactccagttacatttatttactgaaacaaaacta

SEQ ID NO: 5795 - DNA, 74 bp, homo sapiens
agttttatacttattaaggaatatgtttatcaataatagacttcttccatagttttatacttattaaggaatat

SEQ ID NO: 5796 - DNA, 90 bp, homo sapiens
tacctatgatatagaataactacctatgatataggtatgataattacctatgatataggtatacctatgatatagaataactacctatga

SEQ ID NO: 5797 - DNA, 101 bp, homo sapiens
ctttgacgagctgagagaagaaggcttcagatgatcaaactactctgagctgacggagaatgactttgacgagttgagagaagaaggcttcagatgatcaa

SEQ ID NO: 5798 - DNA, 158 bp, homo sapiens
ccttgattcttaccaaaaacaatactgcatttcaagaagatgaaactttttatatggtaaattataaaatcttgcactgctttctatacttgtatcaggagcacccttgattcttaccaaaaacaatactgcatttcaagaggatgaaactttttata

SEQ ID NO: 5799 - DNA, 164 bp, homo sapiens
aggaattcttactaactctttggtatttcttcttcatagactatttgtatacattgatatttgtgcaaccaggatgtagcatatgcaagttgatttctatcttccttcccaggaattcttactaactctttggtatttattcttcatagactatttgtatacat

SEQ ID NO: 5800 - DNA, 108 bp, homo sapiens
attactcaaggactttgcttcctttttctgggaagggattgctctatctgtctctgtcaatattgagtattactcaaggactttgcttcctctttctgggaagggatt

SEQ ID NO: 5801 - DNA, 126 bp, homo sapiens
acaaccactgtatagcatgacctgtataggatgacctacattctatagcagacaaccactgtatagaatgacctacatattttaaatgtaggtcaaatatcaaacaaccactgtatagaatgacct

SEQ ID NO: 5802 - DNA, 92 bp, homo sapiens
atttcaggactttattatattaaattatacattattatatataattatatacatattaagtgtatttaatttcaggattttattatattaaa

SEQ ID NO: 5803 - DNA, 110 bp, homo sapiens
acatataacagcttgttctctctctctgtctctctctctctctctctagatgtatatatatacacatacatacacacatataacaacttgttctctctctctgtctctct

SEQ ID NO: 5804 - DNA, 110 bp, homo sapiens
ggtccagggaccattgtgggttcttgggcaagaggtgtttctgctgctgcgtcagtgagcacaactattctgatcagcagggtccagggaccattgtgggttcttgggca

SEQ ID NO: 5805 - DNA, 71 bp, homo sapiens
ttaataaggtaaagcagaaaaaatacttatgagtacttaataaggtacttaataaggtaaagcagaaaaaa

SEQ ID NO: 5806 - DNA, 352 bp, homo sapiens
gcatcctgctgattggtccattttacagagagctgattggtctgtttcatagagagctgattggtgtgtttacaaactttgagctagacacagagtgctgattggtgtatttacaatcccttagctagacacaaccattctccaagtccccaccagattagctagatacagagtgctgattggtgcatttacaaaccttgagctagacacagagtgctgattggtgtatttacaaaccttgagctagacacatagtactgattggtgtatttacaatcccttagctagacataaaggttctccaagtccccaccagattagctagatacagtgctgattggtgcatttacaa

SEQ ID NO: 5807 - DNA, 101 bp, homo sapiens
gggtgcctggaggcctggctacacagctcagcaaaagatttagaagctgccgtaagtggggaccttcaggtgcaggcagggtgcctggaggccaggctaca

SEQ ID NO: 5808 - DNA, 110 bp, homo sapiens
gaccaacctccacccacaccccctgcaggagatgtgcttgtcagcccccggatgcaataatctagctccagtactgaagttcctagaccaaactccacccacaccccctg

SEQ ID NO: 5809 - DNA, 105 bp, homo sapiens
ctgtttgtaagagacaaacccctggtaaagttaaaacatgctagaatgtgtgtgtgtgatctctgctgtttgtaagagataaacccctggtaaagttaaaacatg

SEQ ID NO: 5810 - DNA, 144 bp, homo sapiens
ctacttcagctaatatttttcaggcagaaaaagcagaaaaagcttttcagtagtatgtgggccggagtacactggtcctcatggcacagtccctcatggctacttcagctaatatttttcaggcagaaaaaggcagaaaaagct

SEQ ID NO: 5811 - DNA, 135 bp, homo sapiens
acatttgggttctgcagcaataaattcaggaaaatacttggctttggccaagcattaatctacctgggatttgggggtggaagaacatttgggttctgcagcaataaattcaggaaaatacttggctttggccaa

SEQ ID NO: 5812 - DNA, 103 bp, homo sapiens
atttagagattcagactgagaaagttttgctcccaatagttaataggaccacaagcatttaaatagagaagatctatttagagattcagactgggaaagtttt

SEQ ID NO: 5813 - DNA, 75 bp, homo sapiens
aataatttaaaatgggaggagtcgacgaagcaaggaatgtattcacctgagcaataatttgaaatgggaggagtc

SEQ ID NO: 5814 - DNA, 78 bp, homo sapiens
tctagggaagttccaaactttcccacatctccctgtcttctgaatcttccaagtttctaggaagttccaaactttccc

SEQ ID NO: 5815 - DNA, 154 bp, homo sapiens
ctgtaacactcaccgcgaaggtctgcagcttcactcctgagctagcgagaccaggaacctaccgggagaaacaaacaactccagacgccccgccttaagaactgtaacactcactgcgaaggtctgcagcttcactcctgagctagcgagacca

SEQ ID NO: 5816 - DNA, 93 bp, homo sapiens
atcttaattttatcataatagagtataaaattatacattatatatgttacttttgactatacgcccagtatcttaattttatcataatagagt

SEQ ID NO: 5817 - DNA, 86 bp, homo sapiens
aggagttctaaaggagttagtatagtaagatacattttgaatttcagcatttctcaagctttaggagttctaaaggagttggtata

SEQ ID NO: 5818 - DNA, 95 bp, homo sapiens
cagttttcaaaaaggagagctatatatatgtacttgaatgatttaatggttaaaaatagacatgaccagttttcaaaaaggagagccatatatat

SEQ ID NO: 5819 - DNA, 98 bp, homo sapiens
tgctcttttccaggcaattttggctgaaatacagaaaaaacaaaaattttaaaggcaaacatgctcttttccaaggcaattttggctgaaatacagaa

SEQ ID NO: 5820 - DNA, 91 bp, homo sapiens
agcagtctgacaaagtgcctctgaatgttgctatcagagattgttgttccaggtcagacacagcagtctgtcaaagtgcctctgaatgttg

SEQ ID NO: 5821 - DNA, 166 bp, homo sapiens
gtaaaggaagataaggaacaatcagaactctcatacagtgctgactggaagtgattgccactttgcaaaagagtttctaataaagttaaacgtatacttttcatatgacccagtaaaggaagatgaggaacaatcagaactctcatacagtgctgactggaagtga

SEQ ID NO: 5822 - DNA, 91 bp, homo sapiens
attacaggcgtgagccaccacccccagcctaattcatatttttataataaaattttaaatctgttaattacaggcgtgagccaccacaccc

SEQ ID NO: 5823 - DNA, 88 bp, homo sapiens
gatttgcaataaattccctcaatttttgctttaagtcttttatacatatttcttacaaatcggatttgcaacaaattccctcaatttt

SEQ ID NO: 5824 - DNA, 94 bp, homo sapiens
ggagttccatctcagggaggtgtaatgctgctaatagcaaagatggtggcccacctctccctcttggagttccatctcaaggaggtgtaatgct

SEQ ID NO: 5825 - DNA, 108 bp, homo sapiens
agctagacacagaggactgattggtgcatttacaaaccttgagctagacacagggtgctgtttgctgcatttacaaaccttgagctagacacagagtactgattggtg

SEQ ID NO: 5826 - DNA, 77 bp, homo sapiens
ttctttcctgaaagctccacccactggggatggattgcaattttcttgtaatctttctttccttaaagctccaccca

SEQ ID NO: 5827 - DNA, 112 bp, homo sapiens
tcctcctagaccacaaggaggaccgaggaatgtcagatgtagtggcccttaccaatgcattctcaaaaacctgtacccttgcctgtcctcctagaccacaaggaggatcgag

SEQ ID NO: 5828 - DNA, 92 bp, homo sapiens
ttctacttgaaatatagacatattgacttgaaatatagatatattgacttgaatatagatatatttctacttgaaatatagatatattgact

SEQ ID NO: 5829 - DNA, 82 bp, homo sapiens
atttctccagatatgaaaaaaattcagatttttttgaaatgtttctgaaaaaaacatttctccagatatgaaaacaaattca

SEQ ID NO: 5830 - DNA, 94 bp, homo sapiens
tataaattaaataatattatcttaaagaccatagaatcaaaaaatattgtattagagaggaagtcaaaggctataaattaaataatattatatt

SEQ ID NO: 5831 - DNA, 132 bp, homo sapiens
ccttacactcctgcctgaacgacagaatgagaccctgtctcaaaaaaaaaaaaaaaaagaaaagatagaaagaaaaaagaaaataccttacactcctgcctgaatgacagaatgagaccctgtctcaaaaaa

SEQ ID NO: 5832 - DNA, 74 bp, homo sapiens
ctgcctctagaaatatggctaataaagatggcttcaaatcaaatagttaacctgcctctagaaatatggttaat

SEQ ID NO: 5833 - DNA, 92 bp, homo sapiens
gctaatttttgtatttttagtagagacagggttttgccatgttacccaggctggtcatcgcatctggctaattcttgtatttttagtagaga

SEQ ID NO: 5834 - DNA, 61 bp, homo sapiens
tatgtataataaatgtataataactaagtggaaatttttatgtataatacatttttaaagt

SEQ ID NO: 5835 - DNA, 119 bp, homo sapiens
gatttagtggcccttactgatgcattctcaaaaacctgcattcttgcctgtcctcttagaccacaaagaggaccaagaaaaattggatttagtggcccttaccgatgcattctcaaaaa

SEQ ID NO: 5836 - DNA, 148 bp, homo sapiens
catttttattttggccaaatttattgctcttgatctcctgaaactctttctaacggaaatctactagttagattttgaattttaaagaaatttcaagacaaatgcatttttgttttggccaaatttattgctcttgatctcctgaaac

SEQ ID NO: 5837 - DNA, 115 bp, homo sapiens
cgcccacctcagcctcccaaagtgctgggaatacagtagtgagccaccgtgcctggcctggtcttgatctcttgacctcgagattcgcccacctcagcctcccaaagtgctggga

SEQ ID NO: 5838 - DNA, 104 bp, homo sapiens
ctcctcttcttctggaacatttttacggagacagacacttgaaggtatttatccgattgccaggttctgtttgaagtaaactcctcttcttctggatcattttt

SEQ ID NO: 5839 - DNA, 102 bp, homo sapiens
gtggctcacgcctgtaatcccaccactctgggaggccgaggtgggtggatcacaaggtcaaaagatcaagaccaggtggctcacgcctgtaatcccagcact

SEQ ID NO: 5840 - DNA, 119 bp, homo sapiens
caacatggtgaaaccccgtctctactaaaatacaaaaaattagccaggcgtggtggagattgagaccatcctggccaacatggtgaaaccccgtctctactaaaatacaaaaaattagc

SEQ ID NO: 5841 - DNA, 153 bp, homo sapiens
ctgattggtgcatttacaaacctttagctagacacagagcgctgactggtgcatttacaatcctttagctagacagaaaagttctccaagtccccacttgattagctagacacagagcactgactggtgcatttacaaacctttagctagaca

SEQ ID NO: 5842 - DNA, 148 bp, homo sapiens
gctcaaatgatccttccacacctggctaatgtttaaaaatttttttgtagagatgaagtcttgctatgttgcctagcctggtcttgaactcctgggctcaaatgatccttccacacctggctaatgtttaaaaatttttctgtagaga

SEQ ID NO: 5843 - DNA, 90 bp, homo sapiens
agctatcctctctgctgagagctgaagagacgttgggacaaccagcattacagctgtagagagaagctaccctctctgctgagagctgaa

SEQ ID NO: 5844 - DNA, 75 bp, homo sapiens
ccccccacctccctcccagacggggcggctggccgggcggggggctgaccccccccacctccctcccggacgggg

SEQ ID NO: 5845 - DNA, 113 bp, homo sapiens
ctaagaaaaatagagataagacataaattactaataaaagctagttctctgaaatggtcaataaaattaataaacctctaagaaaaatagagataagacataaattactaata

SEQ ID NO: 5846 - DNA, 113 bp, homo sapiens; identical to SEQ ID NO: 5845

SEQ ID NO: 5847 - DNA, 136 bp, homo sapiens
ggcactaaagtattaaagagtaaaggggcatgatatgctcaccaacacttcattaaaaacaagcattaatatgtattatataaagaagaggcactaaagtattaaagagtaaaggggcatgatatgctcacaaaca

SEQ ID NO: 5848 - DNA, 85 bp, homo sapiens
ctgtctccctgccttcaaagctattttgaggccacacaatgattcctgggtagagacctgtctccctgccttcaaagctattttg

SEQ ID NO: 5849 - DNA, 86 bp, homo sapiens
cctactcttaacatatatacaccctacacaaacatcctactcataactttcactatgtcctactcttaacatacatacaccctaca

SEQ ID NO: 5850 - DNA, 77 bp, homo sapiens
atccaaacatctatcagagttgaatagataaagaaatctccagctataaacaatccaaacatctatcagggttgaat

SEQ ID NO: 5851 - DNA, 105 bp, homo sapiens
aaaggtctgcagcttctactcctgaagccagcgacgaacaactccagatgtgccgctttaagagctgtaacactcaccgcaaaggtctgcagcttcactcctgag

SEQ ID NO: 5852 - DNA, 103 bp, homo sapiens
ttgcactccagcctgggcaacaagagcttgaccccaggaggcagagggtgcagtgaaccaagatcgtgctgttgctgttgcactccagcctgggcaacaagag

SEQ ID NO: 5853 - DNA, 88 bp, homo sapiens
aagttgaaaccatataaataccacacttggggaccagtattccctcccttggtactggtgtgaagttgaaaccatgtaaataccacac

SEQ ID NO: 5854 - DNA, 87 bp, homo sapiens
taattttagcaaccataaatttattaattaaatattaacttttcctttcatttagctatgtaattttagcaaccataaatatattaa

SEQ ID NO: 5855 - DNA, 125 bp, homo sapiens
gaacataaattgtgaagatttcttggacatttattagttccccaaattaatacttttataatttcttatgcctgtctttactgcaatctctgaacataaattgtgaagatttcatggacatttat

SEQ ID NO: 5856 - DNA, 94 bp, homo sapiens
gatcacttgagctcaggagttcaagtatatcttttgtaatcccagcactttgggaggctaaggcaggtggatcacttgagctcaggagttcaag

SEQ ID NO: 5857 - DNA, 98 bp, homo sapiens
agaaatagaagtctctgtgcttgtttgtaagtataatgtattatttttctttttggggaaatatagaaagaaatagaagtctctgttcttgtttgtaa

SEQ ID NO: 5858 - DNA, 100 bp, homo sapiens
ctccagcctgggcaacagagcaagactctgtctccaatcaatcaatcaatcaatcagtaagatacatttcactccagcctggacaacagagcaagactct

SEQ ID NO: 5859 - DNA, 114 bp, homo sapiens
gatagacagatagatgaaggttgaaggatggatggatagattaaatggatggatggatagatagatagatagatagatagatagatagatagaaagatagatgaaggttgaagg

SEQ ID NO: 5860 - DNA, 112 bp, homo sapiens
agaggggcccctcccctggccctcatgttttggagggccccccctgggtctcatgttttggagggcccctgccttgagtctcaggctttggagggcccccctgggtctcatg

SEQ ID NO: 5861 - DNA, 63 bp, homo sapiens
tcactggctatgagacccttggcaagtcatgagactgtgacatgaggctatgagacccttggc

SEQ ID NO: 5862 - DNA, 104 bp, homo sapiens
ataacgccaattaacaacacatggagatgactttccatgtggaaacacatggaaataacatatctccaacacatggagataacgccgattaacaacacatggag

SEQ ID NO: 5863 - DNA, 96 bp, homo sapiens
aggaggagtgacacagactttgtgttatatttccttataacagaaaatgttataaggaaaaagaaaaaaaggaggaggagtgacacagactttgtg

SEQ ID NO: 5864 - DNA, 108 bp, homo sapiens
agtatatggtaaagtaaaaataaatcggtttacaaatagtatatggtatatggtataaacaaatagcatatggtataaacaaatagtatatggtaaagtaaaaataaa

SEQ ID NO: 5865 - DNA, 115 bp, homo sapiens
aaataaataaataaataaacgagccattgagcatccctcattctgggcgacagagcgagactccgtctcaaaaaataaataaataaataaacgagccattgagcatccctcattc

SEQ ID NO: 5866 - DNA, 91 bp, homo sapiens
tggtggctcaggccaaagggctcccccttatctggagtgcatggaacccctccctgtgaggcttatttggtggctcaggccaaagggcctc

SEQ ID NO: 5867 - DNA, 137 bp, homo sapiens
tgtgtgtgtattgctgtgaacagtagatacataatcataccttccatatgtatatatagagtcacgtttttttttttttttgtgtgtgtgtgtgtgtgtgtattgctgtgaacagtagatacataatcataccttcc

SEQ ID NO: 5868 - DNA, 102 bp, homo sapiens
ccctgtatctgaggctgtcgacacaccttgcaccccaaagaggttagcgatggggaaatgccagcggcaaagatgtctctccagtatctgaggctgttggca

SEQ ID NO: 5869 - DNA, 305 bp, homo sapiens
ggttggtgcaaaaataattgcggtttctgccattacttttcatggcagctttgttgtcatttatataatggttggtgcaaaagtaattgcggtttcccacagggggatgctccttgctgcagccagggtgtcctgatgagtgttcagctcctagcagagagggtagctcctctctgctaggcaagtcatctcaacaagtgtccagctatcagcagagagggtagctcctctctgcagctggttgtcccatcatctgagcagctgccagcagagaggaggccctagagtgggtggctcgtctctgc

SEQ ID NO: 5870 - DNA, 74 bp, homo sapiens
ctgtatctagctactctggtgggggcttggagaacctttgtgtccacactctgtatctagctaatctggtgggg

SEQ ID NO: 5871 - DNA, 156 bp, homo sapiens
ctgaggttttcttttttcattgtgtctctgccaggttttgatactagaatgatgctagcattgtgttgaggatttttgcatctattttcatcaaaggtattggcctgaggttttcttttttcattgtgtctctgccaggttttgatattagaatga

SEQ ID NO: 5872 - DNA, 130 bp, homo sapiens
agttaaaactttgccatagcaaaaagtgttaatattgactgtgctagttaaaacataagtgataattaaaatgttatcttaacaaacttagtgtgttatcttaacaaacttagtatgttatcttaacaaa

SEQ ID NO: 5873 - DNA, 143 bp, homo sapiens
gattgtaaaatgcaccagtcagtgctctgtagctaggaagaagattgtaaaatgcaccaatcagtgctctgtaaaaacacaccaatcagagctttgtagctagcatgaggattgtaaaatgcaccagtcagtgctctgtaaaa

SEQ ID NO: 5874 - DNA, 125 bp, homo sapiens
ataagtgtccatgaaatcttcacaatttatgttcagagatttcagtaaagacaggcataagaaattatgaaagtgttaatttggggaactaataaatgtccatgaaatcttcacaatttatgttc

SEQ ID NO: 5875 - DNA, 73 bp, homo sapiens
gacactctgtatctagctactctggtggggacttggagaacctttgtgtggacactctgtatctagctaatct

SEQ ID NO: 5876 - DNA, 101 bp, homo sapiens
gccaatcagtgctctgtaaaaatgcaccaatcagcactctgtggctagctagaaatttgtaaaatgtgccaatcagtgctctgtaaaaacgcaccaatcag

SEQ ID NO: 5877 - DNA, 100 bp, homo sapiens
ttacattaatgttcattagacataatttttttgctgtgttgctgaattagttttgctagtgttttattgagtatttttacactaatgttcattagacata

SEQ ID NO: 5878 - DNA, 94 bp, homo sapiens
cactgattaaaaggttttaattatctagagagagaatgcaagaactggaatgtgtcgatattttcagcactgattaaaaagttttaattatcta

SEQ ID NO: 5879 - DNA, 111 bp, homo sapiens
atgattatagtttggaatttaatttttttatttacaactctgtctcaaagaaataaacaaaataaaattattatgtcatgattataatttggaatttaatttttttattta

SEQ ID NO: 5880 - DNA, 93 bp, homo sapiens; identical to SEQ ID NO: 301

SEQ ID NO: 5881 - DNA, 105 bp, homo sapiens
gtgtttctgctgctgcattggtgagcacaactattccaatcagcagggtccagggaccattgcaggttcttgggcaagaggtgttactgctgctgcattggtgag

SEQ ID NO: 5882 - DNA, 114 bp, homo sapiens
aaaaaaatttcagcaaataaataagatatacaatagtctcgagccaatttgtcttcagaatgtatggacaaaataaaaaaatttcagcaaataaataagatatacaatagtctc

SEQ ID NO: 5883 - DNA, 79 bp, homo sapiens
ggaaaggtttggaacttcctagagatttggagggctcagaagacaggaagatgtgggaaagtttggaacttcctagaga

SEQ ID NO: 5884 - DNA, 75 bp, homo sapiens
aatataatgtcagcatattgaaactaacatgtaaaaacaaaacaaaacaaaaatataatgtcagcaaattgaaac

SEQ ID NO: 5885 - DNA, 94 bp, homo sapiens
agcaagcatagaaaataacctctcacccttctttgtgtgcttcctgaattccttgatattgtcaacatagcaagcatggaaaataacctctcac

SEQ ID NO: 5886 - DNA, 113 bp, homo sapiens
ccctggctttgttctcaggcccctggagtttctcaactcagcactcctgggatcaatgctataactctgcgggggctggtatcaggccctggctttgttctctggcccctgga

SEQ ID NO: 5887 - DNA, 94 bp, homo sapiens
aagtgcaataaaacaatgcaaaaaacaatgcattcctgtatgtatattccacattttgaattgtggaaacaatgcaataaaacaatgcaaaaaa

SEQ ID NO: 5888 - DNA, 91 bp, homo sapiens
agttacagagctaggattctaaacacaacaattagataaggtatcatttagaaatccctaatagtgagttatagagctaggattctaaaca

SEQ ID NO: 5889 - DNA, 185 bp, homo sapiens
atgtatgcacaaatggaaggatagatgagtgtgtagatgtataggtaaatggatggatggatgaagtaatggatggagggatggatggatggatggatgggtggatggagtgatgaagtgatggatggatggatggatggatggacggatggatggatggatggatgcatggagtgattgatgga

SEQ ID NO: 5890 - DNA, 107 bp, homo sapiens
tatttaagcacctgtttaaatgtcacctccagcccccagtgccctttgcttgcctaataaaaagtaaaaactactcttatttaagcacctgcttaaatgtcacctcc

SEQ ID NO: 5891 - DNA, 85 bp, homo sapiens
gggtctcactgtgttgcccaggctggctggctatttttttctgttttctgtagagacaggggtctcactatgttgcccaggctgg

SEQ ID NO: 5892 - DNA, 136 bp, homo sapiens
ttatataaaaatgtaacagcaaattaatctaaattttatttatttatttacttattttatttttttgtttatacttatgtcatagtttatataaaaatataacagcaaattaatctaaattttatttatttattta

SEQ ID NO: 5893 - DNA, 122 bp, homo sapiens
aatattgcaaaatcattcatgggtaaatgattcatccaaagcacagtgaactaatagtttctaattggccaatatgtaatattgcaaaatcattcatgggtaaatgattcatccaaagcaca

SEQ ID NO: 5894 - DNA, 75 bp, homo sapiens
tgtaattatgttactgattttgataattgtcaaaatgtaattattgtcaatatgtaattatgttactaattttga

SEQ ID NO: 5895 - DNA, 103 bp, homo sapiens
ttgcagtgagccaagattgtgccactgctttgggagggtggggcaggggaatcacttgaacctgtgaggcagaggttgcagtgagccaagattgtgccactgc

SEQ ID NO: 5896 - DNA, 95 bp, homo sapiens
atatctgtgagtttaatatttaacttacagatatggttgatctggagagccagctggatgatatgaattgccatatctgtgagttcaatatttaa

SEQ ID NO: 5897 - DNA, 103 bp, homo sapiens
ttggggattggacaagagttgtgcactgatgagaagaatgattatggggttattgttaacacatcagctgatagatattggggattggaacaagagttgtgca

SEQ ID NO: 5898 - DNA, 158 bp, homo sapiens
agctagatacagagtatcaacacaaaggttctccaagtcaccaccagagtagctagatacagagtgtcgattggtgcattcacaaaccctgagctagacacagggtgatgattggtgtgtttacaaaccttgagctagatacagagtgccgattggtg

SEQ ID NO: 5899 - DNA, 153 bp, homo sapiens
agtaaccaaaatagcatggtactggtacaaaaacagacacatagaccaatagaacagaatagagagcccatgttacctgactttgaactatactacaaggctatagtaaccaaaatgcatggtactggtacaaaaacagacacatagaccaat

SEQ ID NO: 5900 - DNA, 75 bp, homo sapiens; identical to SEQ ID NO: 302

SEQ ID NO: 5901 - DNA, 104 bp, homo sapiens
gaccattgcgggttcttgggcaagaggtgtttctgctgctgcatcagtgagtgcaactattctgatcagcagggtccagagaccattgcgggttcttgggcagg

SEQ ID NO: 5902 - DNA, 154 bp, homo sapiens
gaaaagatcactatctgggactcataagtgtcagagaatcacatactttgcaaaggaaacgatacctgagcagtcaacggaaatatacacaccccacatgaaaagaccactatctgggactcataagtgtcagagaatcacatactttgcaaag

SEQ ID NO: 5903 - DNA, 125 bp, homo sapiens
gaacataaattgggaagatttcatggacatttattagttcctgaaattagtacttttataatttcttatgcttgtctttactgcaatctctgaacataaattgtgaagatttcatggacatttat

SEQ ID NO: 5904 - DNA, 89 bp, homo sapiens
gaccaatcagaggctgaagtgacaaagttacaccatatgccatcgtctgattggttgtggagaatgaccaatcagaggctgaagtgaag

SEQ ID NO: 5905 - DNA, 106 bp, homo sapiens
tacacagtattttatttatactgtgaaagcataatttctaccttgtgaagacaaaatacacttatagtccttaagtactgatttcacagtattttatttatactgt

SEQ ID NO: 5906 - DNA, 111 bp, homo sapiens
taagttagttcagccactgtggaaagcagtttgaagatttctgaactcttatacactgctggtggaatgtaagttagttcagccactgtggaaagcagtttgaagatttct

SEQ ID NO: 5907 - DNA, 94 bp, homo sapiens
agcaacagcctgggctccagagttggacactgcactcaccagactatggaggattcaccaccacaatgggaagcaacagcctggggtccagagt

SEQ ID NO: 5908 - DNA, 135 bp, homo sapiens
gttggtcaggctggtctcgaactcctgacctcaggtgatctaccaccatgcccagctaaacttttgtatttttagtagagacagggtttcaacatgttggccaggctggtctcgaactcctgacctcaggtgatc

SEQ ID NO: 5909 - DNA, 109 bp, homo sapiens
taaaatgaggtatagctacttttagaaagttcaaaagttacctttatctaggttcactaaagtgtccatccgccaaaagtataaaatgaggtatagctacttttagaaa

SEQ ID NO: 5910 - DNA, 113 bp, homo sapiens
agacttagtgcaaaaggacagcggggtcccccccttccacaataacttgtgggggggtcagggacgcccggagggacgggggagacttagtgcaaaagggcagcggggtcccc

SEQ ID NO: 5911 - DNA, 104 bp, homo sapiens
cttgatttctgccttaatttcattatttgagattctggtacattgtatctttgctgtcattagtttcaagtaacttcttgatttctgacttaatttcattattt

SEQ ID NO: 5912 - DNA, 103 bp, homo sapiens
ttttaaaataaaaaactgttaatatccagttgtaatgaaagattattaccaactgttaaaatctataataacttatttttattaaaataaaaaactgttaata

SEQ ID NO: 5913 - DNA, 75 bp, homo sapiens
tcagttaaggcaggaacaggccattttcacttcttttgtggtggaatgtcgtcagttaaggcaggaaccggccat

SEQ ID NO: 5914 - DNA, 151 bp, homo sapiens
caaatagtatttttattaaaatactataggaagttttagtataccaaatatgctaattagcataccaattagtatttttattaaaatactaatttttaccatggaatatagcatttcaccatgaatatagagtatttttattaaaaataaa

SEQ ID NO: 5915 - DNA, 92 bp, homo sapiens
acattcaaaatatccccacggttgaccaagaaattaaatcggcctaatggagcttgctccagaaaacactttcaaaatatccccacggttga

SEQ ID NO: 5916 - DNA, 116 bp, homo sapiens
cctggttgtcctttatcctaggcctatatagaaaatgccagcatccctcagaggctgcaggatgtgcccctccctagagcctggttgtcctttattctaggcctatatagaaaatg

SEQ ID NO: 5917 - DNA, 162 bp, homo sapiens
aatacaccaatcggcactctgtatctagctcaaggtttgtaaacacaccaatcagcaccctgtgtctagctcagggtttgtgaatacaccaatcgacactctgtatctagctactctggcagggacttggagaacctttgtatccacactctgtatctagct

SEQ ID NO: 5918 - DNA, 115 bp, homo sapiens
ttaacatattattagtgtattattacataatatgtttttctttaacatattatatgttcttctttaacattattagtgtaataatattaacatattattagtgtattattacata

SEQ ID NO: 5919 - DNA, 113 bp, homo sapiens
gatttagtggcccttaccaatgcattcttgaaaacgtgtacccctgcctgtcctcgtagaccacaaagaggactgagaaaaatcagatttagttgcccttaccaatgcattct

SEQ ID NO: 5920 - DNA, 114 bp, homo sapiens
tgaggctcaatttcccttaccagaaatgtttcacattttggggtgaggctcaattcccttacaggaaatgtcttgccttttgggatgaggctcaatttcccttactagaaatgt

SEQ ID NO: 5921 - DNA, 94 bp, homo sapiens
gctctcagcatagaggaggccctggggagggtagctcctctctgcccgctggtcgtcccatcatctgctgctctcagcagagaggaggccctgg

SEQ ID NO: 5922 - DNA, 125 bp, homo sapiens
ataaatgtccatgaaatcttcacaatttatgttcacagattgcagtaaagacaggcataagaaattataaaagttttaatttggggaactaataaatgtccatgaaatcttcacaatttatgttc

SEQ ID NO: 5923 - DNA, 122 bp, homo sapiens
taaagacaggcataagaaattataagagtattgattggggaagtggtaaatgtccatgaaatcttcacaatttatgttcagagattgcagtaaagacaggcataagaaattataaaagtatt

SEQ ID NO: 5924 - DNA, 124 bp, homo sapiens
aacataaattgtgaagatttcatggacatttattagttccccaaactaatacttttataatttcttacgcctgtctttactgcaatctcttaacataaattgtgaagatttcatggacacttat

SEQ ID NO: 5925 - DNA, 74 bp, homo sapiens
gggaggttgaggcaggcagatcacgctcacacctgtaatcccagaactttgggaggttgaggcaggcagatcac

SEQ ID NO: 5926 - DNA, 103 bp, homo sapiens
actgaaatgttcatcaactgatggatgaacaaacaaaatgtgtgatatacatacagatatatatacagtgtgatatacatactcaaatgttcatcaactgatg

SEQ ID NO: 5927 - DNA, 238 bp, homo sapiens
tgggaggccgaggcaggcagatcacttgaggtcaggagttcgagaccagcctggccaacatggtgaaaccccgtctctactaaaaacacaaaaattagccgggtatgatggtacacgcctgtagtcccagctacgtgggaggctgaggcaggagaatcgcttgaacctgggaggctgaggcaggagaatcgcttgaacctgggaggctgaggcaggagaatcacttgaacctgggagg

SEQ ID NO: 5928 - DNA, 115 bp, homo sapiens
tcctcctccctgtgccctgggcgtgacatctgcagcctggaaagaggatttttcaaaactcacctggaacattcctcctccctgtgccctgggcgtgacatctgcagccaggaaa

SEQ ID NO: 5929 - DNA, 81 bp, homo sapiens
ctcactaattttagtatccatttgttgtaaacatcttgttactccttgaacttttgctcactaattttagtatccattggt

SEQ ID NO: 5930 - DNA, 73 bp, homo sapiens
gatgatggatatacagtacatgttcatacaaatgtatgaacattatgtatgatatggatatacagtacatgtt

SEQ ID NO: 5931 - DNA, 89 bp, homo sapiens
gcctgtattcccagcactttgggaggccaaggtgggcagatcacgaggtcaggtggctcacgcctgtaatcccagcactttgggaggcc

SEQ ID NO: 5932 - DNA, 77 bp, homo sapiens
gggttttagattccaattgcaactcatctttttttaggggggtggggtggggtggggtttagattccaattgcaact

SEQ ID NO: 5933 - DNA, 596 bp, homo sapiens
ccccgtctgggaaaccgatcatcatcagcacgtcttgaaaggcgatcatcatccatgtttctccaagggcccctgtcatcctctgcaccacgcctgggaattctgtcatcatcggcgttcctccaaggtcctcgatcatcatccaaccctcgcctgggaccccggtcatcatccatgcctcgcctgggaccccggtcatcatccatgcctcgcctgggaccccggtcatcatccatgcctcgcctgggaccccgatcatcatccaaccctcgcctgggaccccggtcatcatcagcattacgccaggatgatcgctcatcatcagcgcctcctcgcctcggcccccggtcatcatccatcccacgtcttggtcctctgtcctcatcagctgttcgccagcttcctctgtcctcatccagtcctcgtctaggtggtctgtcatcatccgcatgacgccagtttcccctgtcttcatcggcaattcgtctgggaggcctgtcatcatctgtgttacgccaggaaggccggtcatcgtctgccccacgacgagagaacctatcttcctcaggaccacgtctagggcctctgtcatcatc

SEQ ID NO: 5934 - DNA, 142 bp, homo sapiens
tgttttgtttaaatcaggatgccaagatgtatctaaccagaacctatctgggtttgattaaaactcgtcgaccaccagatctccctctgtcacactgttttgttttgtctaaatcaggatgccaagatgtatctaaccagaa

SEQ ID NO: 5935 - DNA, 98 bp, homo sapiens
ggtggtttgctgcacctatcaacccgtcatctaggttttaagcccaggtttgtcacataggtatacatgtgccatggtggtttgctgcacctatcgac

SEQ ID NO: 5936 - DNA, 81 bp, homo sapiens
ctaggggtgcaagcctctgtgtgtttgtttgtgtgtgtctgtgtgtgcgtatccacactaggggtgcaagcctctgggtgt

SEQ ID NO: 5937 - DNA, 100 bp, homo sapiens
tatttttagtagagacagggtttccctcccaagtagctgagattacaggcacatgccaccatgaccggctaatctctatttttagtagaggcagggtttc

SEQ ID NO: 5938 - DNA, 115 bp, homo sapiens
tgtgagcagctggaacccaggaggaaaggccagggcctgtctcgctcccctttcccggtgcccacgtctgccttgtgagcagctggaacccaggaggaaaggccggggcctgtct

SEQ ID NO: 5939 - DNA, 77 bp, homo sapiens
gaaggcacccgttacttagcagaccttggactagccatagcgccagtgcctgggaaggcacctgttacttagcagac

SEQ ID NO: 5940 - DNA, 107 bp, homo sapiens
aaagattctccaagtccccaccagattagctagacacagggtactgattggcgcatttacaatcctctagctagacataaaagttctccaagtccccaccagattag

SEQ ID NO: 5941 - DNA, 128 bp, homo sapiens
aagtatgtagagttgtccattatggctacaatgcggaatgctggggggagagggaaagatgcgtagagaggtaaaggggtaaaagtatgtagagttgtccattatggctacaatgcggaatgctgggg

SEQ ID NO: 5942 - DNA, 93 bp, homo sapiens
ccccagccagggagaagctattgccacattcttcttacgccacagccctggtatgcttctaggagccccaaccagggagaagctattgccaca

SEQ ID NO: 5943 - DNA, 71 bp, homo sapiens
attgctgggtaacaaattaccccaacaaattacctctcctacccatctattgctgggtagcaaattacccc

SEQ ID NO: 5944 - DNA, 87 bp, homo sapiens
tatttttagtagagacggggtttcaccattttgtgccaccacgcccggctaatttttgtatttttagtagagacagggtttcaccat

SEQ ID NO: 5945 - DNA, 79 bp, homo sapiens
tgaattttgctaatattttctacacttgatcttagccaaaaggccgagaagcgatgaattttgctaatattttctaaca

SEQ ID NO: 5946 - DNA, 80 bp, homo sapiens
tttatatacaatatacacacacacatatacagtgtataatatatatactatatatattatatatataatatacacacaca

SEQ ID NO: 5947 - DNA, 84 bp, homo sapiens
tgtttcccctatagatgtcttcgtcctctgttcctgtgtcctgtgtcctttgtcttgtttcccctatagatgtctttgtcctct

SEQ ID NO: 5948 - DNA, 84 bp, homo sapiens
ccaacgctgttcttttgtggtctctggaaccaccacgctggaataggctggaacccaaccaacgctgttcttttgtggtctctg

SEQ ID NO: 5949 - DNA, 106 bp, homo sapiens
tcctgatccaggagagatgaactaagagtctgatctacattctgtacagaatttccttccctttccaggcctcttcctgatccaggagagatgaactaagggtctg

SEQ ID NO: 5950 - DNA, 80 bp, homo sapiens
gtactctagcttgggtgacagagaataggctactgccatcatagagattaggccaccgtactctagcttgggtgacagag

SEQ ID NO: 5951 - DNA, 99 bp, homo sapiens
agtatattggtggcatttttagaccacacagaattgccagtcgcagctgagttgatctattgtaaagttgccagtatattggtggcatttcttagacca

SEQ ID NO: 5952 - DNA, 149 bp, homo sapiens
taataatattttgagtaaattttcattctctctccaatttatttacacacacactcatgagtggataaaataaatattaataaatattttgagtaaatttttatcacaaaatatgtcatattttcttaaaactattctgaatattttat

SEQ ID NO: 5953 - DNA, 87 bp, homo sapiens
attctactggtgctacattctactagtgctgcattccactagtgcaattctactagtgcttgcaattctactagtgctacattccac

SEQ ID NO: 5954 - DNA, 102 bp, homo sapiens
atcaaaaggacatgattacaagagggaatggaaaattccctcattatcaaaaattatcatgtcattatcaaaaggacatgattacaagagggaatggaaaat

SEQ ID NO: 5955 - DNA, 85 bp, homo sapiens
gggacaagaaaaagagtaacttttcaatggagaaatctgggagcttccaacaaatagagtacgggacaagaaaaaaagtaacttt

SEQ ID NO: 5956 - DNA, 97 bp, homo sapiens
tttgttctaggtcctgatgctcaacaattggtactggacttaattccttcaatttgttactgtaacatcagaggtttgttctaggtcctgatgctca

SEQ ID NO: 5957 - DNA, 111 bp, homo sapiens
ttgcttgtaactctttttaattccttgtagattctgacctttgttggatttttgtctgtttttttttaacgaggttgtttgttttttgcttgtaactctttttaagttcct

SEQ ID NO: 5958 - DNA, 93 bp, homo sapiens
tgctgtgttattctagcagcaggaatatctagtagagggaatatgctcctcctacttattaaaacagtgtgctatgttattctagcagcagga

SEQ ID NO: 5959 - DNA, 92 bp, homo sapiens
atttgcctttgaaatcttgtgtcattttgatttaatttcattttatctacaactacgttaattttctgtatttgcctttgaaatcttgtgtc

SEQ ID NO: 5960 - DNA, 74 bp, homo sapiens
tttcctgagagactaatgctgctataaagaaagtcaatatttgatgagcaatttcctgagagactagtgctgct

SEQ ID NO: 5961 - DNA, 110 bp, homo sapiens
caggttttcaagaatgtgtcagtaagggccactaaatctgatttttctcagtcctctttgtggtctaggaggacaggtaagggtgcaggttttcaagaatgtgtcagtaa

SEQ ID NO: 5962 - DNA, 111 bp, homo sapiens
cacagacattggtttaatcatttaaacgtaattataccattttatttttcaccaacataaaagtgaaggctgagtaactcacagacattggtttaatcatttaaacataat

SEQ ID NO: 5963 - DNA, 82 bp, homo sapiens
tttctataatcccttactactcaggagtcatagaccagaggtcataagataggcctactttctataatctcttactactcag

SEQ ID NO: 5964 - DNA, 100 bp, homo sapiens
gaaaagagtcaagtgatggcatgtaggtccagaaggaaaacaacttcacactcctcttgactttggcagaaaagattcaagtgatggcatgtaggtccag

SEQ ID NO: 5965 - DNA, 66 bp, homo sapiens
ggagctaggaggggacagagacctaggggacagctctctgcgaggagctaggaggggacagagagc

SEQ ID NO: 5966 - DNA, 84 bp, homo sapiens
tttttgtttttaagacagggtctctttttcacgcttttttttgtttttgttttggttttgtttttgttttcaagacagggtctc

SEQ ID NO: 5967 - DNA, 132 bp, homo sapiens
atatgactaaatcaaataaaatgaaaactactagctacatttattggaagtttactgggtagcaataaataccctattaataaaacgatatgactaaatcaaataaaatgaaaactactagctacatttatt

SEQ ID NO: 5968 - DNA, 88 bp, homo sapiens
cctagtatctgggattacaggcaggtacaaccagagttcaagcaattctcatgcctcagcctccctaatatctgggattacaggcagg

SEQ ID NO: 5969 - DNA, 75 bp, homo sapiens
ccacagcccctcacctgtcctatctgcagggaatgcagaaaatgtctgtgagccacagcccctcacctgtcttat

SEQ ID NO: 5970 - DNA, 96 bp, homo sapiens
ttgaaaatgcagcgtgccaaatgcaccatgccaaatacccccatacacatcagccagcctaaacatttgaaaatgcatcatgccaaaatgcaccat

SEQ ID NO: 5971 - DNA, 103 bp, homo sapiens
ttgctcaaatatcaatccctagctcttggttttttatgattgattgattgatttgagatggagtttgctcaaatatcaatccctagctcttggttttttatga

SEQ ID NO: 5972 - DNA, 111 bp, homo sapiens
tcagtatcataaacgataattagtatacaatctaggacacataaaattcggatgtccataaaatattgttagctccgtcatcagtatcataaaggataattagtatacaat

SEQ ID NO: 5973 - DNA, 75 bp, homo sapiens
tttttccttgctgcatagtgttccattgtatgttacatgtatctgtatcttatttttccttgctgcatagtgttc

SEQ ID NO: 5974 - DNA, 79 bp, homo sapiens
atcccctcaaaatatctggtttggtcataaatacagtagagcttcagtcttcagatcccctcagaatatctggtttggt

SEQ ID NO: 5975 - DNA, 112 bp, homo sapiens
ggaaagccatcagacaccgtggtgaaccaggcagccgtggtgcctgcccgatgtaggcactgggtggtggagacgtggaaagccatcagacaccgtggtgaaccaggcagcc

SEQ ID NO: 5976 - DNA, 96 bp, homo sapiens
cactgatatatttttgcagaagctattttgtatattcacagatctatttcactgatatatgcccactgatatatttttgcggaagctattttgtat

SEQ ID NO: 5977 - DNA, 125 bp, homo sapiens
gccttgagggttcctcccctttttagactatatagggatggcttattcatgaactttctggggaaaggggtgggccattctcagccttgagggttcctcccctttttagactatataaggatggc

SEQ ID NO: 5978 - DNA, 106 bp, homo sapiens
caactattccaatcaacagggtccagggaccattgtgggttcttgggcaagaggtgtttctgctgctgcattggtgggctcaactattccaatcagcagggtccag

SEQ ID NO: 5979 - DNA, 91 bp, homo sapiens
tttctgagacaatagctgattagaacagtgattagaactgtgatttctgagacaatagctgatttctgagacaatagctgattagaacagt

SEQ ID NO: 5980 - DNA, 133 bp, homo sapiens
acaaattactttttaaagttcaaccaatgtcaattttacattcataaagtcaaatgtttattttacttaattttaaatacattctaacaacaaattactttttaaagttcaaccaatgccaattttacattca

SEQ ID NO: 5981 - DNA, 118 bp, homo sapiens
tgaataatgttgctatgcacattcatgtatacgtgtgtttgtgtggacagcatgtggactgtttctacttttcacagttatgaataatgttgctatgcacattcatgtatacgtgtgt

SEQ ID NO: 5982 - DNA, 73 bp, homo sapiens
aagagtaataaaaaatttaacaaaaattaactcaaaatttaacataaactaactcaaaaattaactcaaaagt

SEQ ID NO: 5983 - DNA, 94 bp, homo sapiens
aataaattgaatctcttctgaagtcttgtgtactctggacaaagttggtgttaaacatttactaaataaactgaatctcttctgaagtcttgtg

SEQ ID NO: 5984 - DNA, 105 bp, homo sapiens
tcattaatgccttctgatttggagggaagactgagtacctagcactgaagaaagagtgagttaatgaaatgttgagatgtctcattaatgccttctaatttggag

SEQ ID NO: 5985 - DNA, 97 bp, homo sapiens
agctacatttgtagaataatagtacaaaaaggtaactgtaatcctggtattctacttggctcagtagatgatgagctacatttgtagaataatacta

SEQ ID NO: 5986 - DNA, 85 bp, homo sapiens
acttaaaacaaccagagtttaaggcagatgtggacaaattgggagtaatcccgcatgacttaaaacaaccagagtttaaggcaga

SEQ ID NO: 5987 - DNA, 78 bp, homo sapiens
tgcacttcctggaacatctgcccactgcagaaatgcagtgtctctggagaaatgcacttcctggaacatctggccact

SEQ ID NO: 5988 - DNA, 95 bp, homo sapiens
aaaataccttacaccttagtgtaaagaactacagatattttagtaaatctacttccttttgatgtcgagaaaataccttacaccttagtgtgaag

SEQ ID NO: 5989 - DNA, 75 bp, homo sapiens
gacacaaaggttctccaagtccccaatagattagctagatacagagtgtggacacaaaggctctccaagtcccca

SEQ ID NO: 5990 - DNA, 101 bp, homo sapiens
gttgggtttgggaatctgagattctaattatcagccagctttgacacctgcaactgggtcagaatcccagggttgggtttgggaatctgagattcttatta

SEQ ID NO: 5991 - DNA, 112 bp, homo sapiens
tccagggaccattgcgggttcttgggcaagaggggtttctgctgtgtcagtgagcacaactattctgatcagcaggttccagggaccattgcaggttcttgggcaagagggg

SEQ ID NO: 5992 - DNA, 187 bp, homo sapiens
attgtaaaatgcaccaatcagctctctgtagctaggattgtaaaacgccccaatcggcgctctgtagctagctagaggattgtaaaacgcaccaatcagtgctctgtggctagaggtttgtaaaatggaccaatcagcactctataaaatggaccaatcagcactctataaaatggaccaatcagca

SEQ ID NO: 5993 - DNA, 480 bp, homo sapiens
cccccttcccttccttccctctcctctcaacccccactcccctcacaccttcccctccccctcactcctctcccctctcctcagggctccctggcttcctgcctcacccttcccctccccccactccccttcctcagggctccctcccctcactccctccccactcactccctctccccttcctcagggctccccgcctcactccctccctgctcactcccctccccttcctcagggctccccacccccccactcctcctcccctctcctcagggctccccccctcactcccactcactctcctcccctctcctcagggctccctccctcctcactccctccccgctcactcccctccccttcctcagggctccctcccccctcactccctcccccgctcgctcactccctctcgcctctcctcagggctccccggcttcctgcctctctgaattcctcctccagaccctcaaggctccc

SEQ ID NO: 5994 - DNA, 102 bp, homo sapiens
gccgggcagagacgtcctcacttcctagatgtgatggtggccgggaagaggcgctcctcacttcctagacgggatggcggccgggcagagacgctcctcact

SEQ ID NO: 5995 - DNA, 83 bp, homo sapiens
catttacatagggcatacaccaagtaaataattttgtaactttacttcacccccttcatttacataaggcatacaccaagtaa

SEQ ID NO: 5996 - DNA, 101 bp, homo sapiens
tccttcacccttagcggcaagtcccgctttcctggggcaggggcaagtacccctcaaccccttctccttcacccttagcggcaagtcccgctttcctaggg

SEQ ID NO: 5997 - DNA, 82 bp, homo sapiens
tctcatacatacttacttatgataaagtttataaaccaaaccctgtatatactgttttgtctcatacatacttacctatgat

SEQ ID NO: 5998 - DNA, 186 bp, homo sapiens
agctagatacagagtgtcgattggtgcattcacaaaccttgagctaaacacagggtgctgattggtgtgtttacaaaccttgagctagatacagagtgccgattggtgtatttacaatccctgagctagacataaaggttctccacgtccccaccagagcagctagatacagagtgtcgattggtg

SEQ ID NO: 5999 - DNA, 103 bp, homo sapiens
aagagtcattgggagccagatatgcaaggatgaaggcctgggcagagactcagagggcttcttaggggaagagtcattgggagccagatatgcaaggatgaag

SEQ ID NO: 6000 - DNA, 127 bp, homo sapiens
ctgaggtccaagtattcctgaaagaagggaagagagacgttttatttcatcttgggtcaggataacaaggtgaatacggttcgagaggctgactgaggtccaagtattcctgaaagaagggaagaga

SEQ ID NO: 6001 - DNA, 74 bp, homo sapiens
accaccccctcctcttcccaaggagcaaagccatgaggtccaaccaggagcaccaccccctcctcttcccaagg

SEQ ID NO: 6002 - DNA, 106 bp, homo sapiens
ggggatcatgaggtgtcccttcacacctccagccagggagctgctgtctctagatctcactgtcttcatctgaaaagggggatcatgaagtgtcccttcacacctc

SEQ ID NO: 6003 - DNA, 75 bp, homo sapiens
attttactcaggcccacaaagcccttggggttgtgcctcgattttactctcgattttactcaggcccacaaagcc

SEQ ID NO: 6004 - DNA, 82 bp, homo sapiens
tgttatccccagaccttctgcaatacttacgcatacaaatcggcatcagaaggtctgttatccccacaccttctgcaatact

SEQ ID NO: 6005 - DNA, 95 bp, homo sapiens
gcattgccaccaacactcccagccccacgaaggaaaagaaaatcccccactcagctctcatgcattgccaccaacactcccagccccgcgaagga

SEQ ID NO: 6006 - DNA, 104 bp, homo sapiens
cctccacccctgcctctcctccacccctgcctcccctccacccctgcctctcctccacccgcccaggagagccccacctcctccacccctgcctctcctccacc

SEQ ID NO: 6007 - DNA, 71 bp, homo sapiens
cctggccaggcctggacgatggatcggcaaccaggatcctcgcctgcccctggccaggcctgggcgatgga

SEQ ID NO: 6008 - DNA, 112 bp, homo sapiens
gtggctcaagcctgtaatcccagcacaaagggaggctgaggcgggcagatcacctgaggtcaagagttcaagaccggccgggtgcggtggctcacgcctgtaatcccagcac

SEQ ID NO: 6009 - DNA, 96 bp, homo sapiens
cccaggctggagcgcagtggcatgatcttttttttttttttttttttaaacagggtctcactctgtcacccaggctggagtgcagtggcatgatct

SEQ ID NO: 6010 - DNA, 98 bp, homo sapiens
tattatgacaggtagctataaaggcgtataagtgtattattatttaaggtgtataagtgtattatgaaagaggtatattatgacaggtagctataaag

SEQ ID NO: 6011 - DNA, 96 bp, homo sapiens
tccatgctccttacagccagtggacagcctcgccttggagatgtggccagatgggctgcctcttaagtcctcgtccatgctccttacagccaatgg

SEQ ID NO: 6012 - DNA, 111 bp, homo sapiens
aggccctattccagtaagtacacctgccctttggatgaaattttttttaagtcactgtgagataccagggttaggtctgagaggccctattccagtatgtacacctgccct

SEQ ID NO: 6013 - DNA, 102 bp, homo sapiens
cagtaggtgctcctgcagctcccgtatctcccggggcacacaggtgctcctgcatcttctgtatcccccggggcgcacagtaggtgctcctgcagctcctgt

SEQ ID NO: 6014 - DNA, 113 bp, homo sapiens
attactaagtatatacccaaaggaatagaaatcattctattatattactaagtatatacgcaaaggaatataaatcattctattatattactaagtatatacgcaaaggaata

SEQ ID NO: 6015 - DNA, 76 bp, homo sapiens
atggcaaatcccttgaaagacacagaagattgccaaaacagacttatatgagatggcaaattccttgaaagacaca

SEQ ID NO: 6016 - DNA, 71 bp, homo sapiens
ttccacctgcctttccttctacccagcctcagttctacttgtgctcaattccacctgcccttccttctacc

SEQ ID NO: 6017 - DNA, 116 bp, homo sapiens
cttgatttccagactggtttatcccaacacttgctaactccacgttagggctcttagtggctaattgtctctaagcttgatttccagactggtttatcctaacacttgctaactcc

SEQ ID NO: 6018 - DNA, 102 bp, homo sapiens
cccattggattggatgtttttccagactgaggtgtgcttaccctttttttcttttcttctgctatgttggtgtagatcccattggattggatgtttttccag

SEQ ID NO: 6019 - DNA, 76 bp, homo sapiens
tattgtatactataaacttgctgagtgtaaaatttagctataataaatacatattgtatactataaatttgctgag

SEQ ID NO: 6020 - DNA, 81 bp, homo sapiens
tatgtgtgtgtacgtgtatgagcatatataagcatgtatgtgcactattataactattatgtgtgtgtacatgtatgagca

SEQ ID NO: 6021 - DNA, 91 bp, homo sapiens
gttgaaaataaaaatgtaaaaacacattccaaaaatgtaaaattaaaatataattctgaataaaagtgctgaaaataaaaatgtaaaaaca

SEQ ID NO: 6022 - DNA, 87 bp, homo sapiens
agggatgggataggaaggggctgaggtgccaggcaaaagtcttgtctcctgcagggtttgagggatgggacaggaaggggctgaggt

SEQ ID NO: 6023 - DNA, 98 bp, homo sapiens
atcagaaccaggtcagagcccctacgccctggtcagatcagaaccaggtcagaactcccctacaccacagtcagatcagaaccaggtcagaaccccta

SEQ ID NO: 6024 - DNA, 118 bp, homo sapiens
tcttagacacaaaggaacctttagaaattgctctttagaccttttgccccggtgtgatctcaagcccccgcaccattctactctctcttagacacaaaggaacctttcgaaattgctc

SEQ ID NO: 6025 - DNA, 77 bp, homo sapiens
gaggcctctcttcctggcttgcagagggtgcccaggagggtgggtttcccctgaggcctctcttcttggcttgcaga

SEQ ID NO: 6026 - DNA, 120 bp, homo sapiens
cagatgcttggagaagaccttagacactggcttagagccattcgccttcagacggcagcctgcccctgaggacaaatccgcagatgcttggagaagaccttagacactggcttagagcca

SEQ ID NO: 6027 - DNA, 84 bp, homo sapiens
gaagctacggactgggagaaccagtagatttcaacccctaggttaactttaaccagtcaatgaagctatggactgggagaacca

SEQ ID NO: 6028 - DNA, 106 bp, homo sapiens
cagaatggatccctttagcttcgactgagtgccattgctgggactcagggcgaggtggcaactctgggagggtctccaagcagaatggatccctttagctttgact

SEQ ID NO: 6029 - DNA, 80 bp, homo sapiens
caagtctctaggaagttccaaactttcccacatcttcctgtcttctgagccctccaagtctctaggaagtttcaaacttt

SEQ ID NO: 6030 - DNA, 97 bp, homo sapiens
gggggtggttagagggctggggggccgtccgttgggagatcagggtgcagggccagggctgtgttaggtgctgagggggtggttagagggctggggg

SEQ ID NO: 6031 - DNA, 120 bp, homo sapiens
gacaggctccctacagcaggggccatggtgggcctttgggcatctggatcagcgatgcctaggacaggactctggccccactctgcctgacaggctccctacagcaggggccatggtggg

SEQ ID NO: 6032 - DNA, 101 bp, homo sapiens
tgtttgcaggcattcccactccagctgagagccggcccctagcaggcgttcccactccagcggagagccgggccgctgtttgcaggcattgccactccagc

SEQ ID NO: 6033 - DNA, 81 bp, homo sapiens
cctagagctgagctatcaaggaccacagaggacggagccctctcgttgtgaagatcctagagctgagctatcaaggatcac

SEQ ID NO: 6034 - DNA, 99 bp, homo sapiens
tctgtctgtgagttctctgttctgttgccctatgcatctattccaaaatcagtgggacatatttttgtgggttctgtctgtgagctctctgttctgttg

SEQ ID NO: 6035 - DNA, 114 bp, homo sapiens
cacctggctttccctgcgaggacacggcatctgggctgggcacgcgtctggggcccctccaggcctggcgaacactgtgctccccccacctggctttccctgtgaggacacggc

SEQ ID NO: 6036 - DNA, 97 bp, homo sapiens
gacacagggtcttattctccagccacccggtgcagtggggactgtgtgccctgcggcagggggagcggcagacacagggtctcattctccagccacc

SEQ ID NO: 6037 - DNA, 96 bp, homo sapiens
gaggggccaagctgacttctgctctcccctgcacctgctcctgagagttcgctgggctgcggatggaggggccaagctgacttttgctctcccctg

SEQ ID NO: 6038 - DNA, 81 bp, homo sapiens
atttcattggccaaggcaagtcacatggccctactgccacatgacacttgtacttgaatttcattggccaaggcaagtccc

SEQ ID NO: 6039 - DNA, 78 bp, homo sapiens
gggtccagcacatctcccccacacacccaccctctctctgacatcacttgttgggggtccagcacatctcccccgcac

SEQ ID NO: 6040 - DNA, 245 bp, homo sapiens
aggctcaagcaatcctcccacctcagcctcctgggtagctaagaggctcaagcaatcctcccacctcagcctcctgggtagctaagaggctcaagcaatcctcccgcctcagcctcctgggtagctaagactacaggtgcataccaccatgcctagctaagttttcctttcttatgctgcccaggctggtctcaaactcctgggatcaagcaatcctcctgcctcagcctcccaaagtgctggga

SEQ ID NO: 6041 - DNA, 100 bp, homo sapiens
agctgaagccttgtcccacacgaggtgacttgctcatggtggcttttcctgtatgtgcttggtaattttcaagagctgaagccttggcccacacgaggtg

SEQ ID NO: 6042 - DNA, 89 bp, homo sapiens
taccccacacgtcccaaccctaaccccaaccacactctctgcaaccagactcccacttaccccacatgtcccaaccctaaccccaacca

SEQ ID NO: 6043 - DNA, 103 bp, homo sapiens
gtgtgccggcggggctggccccggtgcagctccatccctctgcccccaagtgcagcttcacccctcttcccccaagtgtgtgccggcggggctggcccggtgt

SEQ ID NO: 6044 - DNA, 132 bp, homo sapiens
tcccccttgctgttctcgtgatagtgagttctcacgagatcagtgttggaggagggtcctggtgggaggtgactggatcatggggtggagttcccccttgctgttctcgtgatagtgagttctcatgagatc

SEQ ID NO: 6045 - DNA, 74 bp, homo sapiens
tccaagactcattgtctaaatcatgcctgatttagacaatcagaaatgatgtccaagactcattatctaaatca

SEQ ID NO: 6046 - DNA, 114 bp, homo sapiens
ctccactgctggtcacggtctgaactaggaagcgcgcccagtcctccactgctggtcacagtctgaactaggaggtgcactcagtcctccactgctggtcatggtctgaactag

SEQ ID NO: 6047 - DNA, 125 bp, homo sapiens
gccccctccctcatctcccctgtgcctgagtctgtccggctgttctcctctcccccagccccagtcctgaggcttgtcctggaaggacccccgccccctccctcatctcccctgagcctgagtct

SEQ ID NO: 6048 - DNA, 362 bp, homo sapiens
caggagagtgtgcgggggctggaggggctctgtcaggagagtgtgcggggagtctcatccaggagagtgtgcggggactggaggggctctgtcaggagagtgtgcgggggctggaggggctctgtcaggagagtgtgtggggcgtctcacccaggagagtgtgcgggggctgggtctgggcttcaggggaggagagtatgtgggggctgggtccgagctccaggacacccagaagagtatgtggaggctgggtccaggctccaggacaccaggagagtgtgcaggggctgggtctgggctccaggagaggagaggagactctcgacggtgggcagccccagggaatggcatggtggctggag

SEQ ID NO: 6049 - DNA, 101 bp, homo sapiens
tttctgtctccccagcctgagccccgtcttcacctgcagcacagacagggcctgtccgccgggcttggttggaaccatttctgtctccccagcctgagccc

SEQ ID NO: 6050 - DNA, 99 bp, homo sapiens
caacagacgtagatgccacccaggggagcccctgtctaaatggcaccagaattggacaccatgtccccaacagacgtagatgccacccaggggagcccc

SEQ ID NO: 6051 - DNA, 99 bp, homo sapiens
gccctggacgctgtgaagcctcccttcttcctcagccatggcgccctgggccaggccatataagccctggatgctgtgaagcctcccttcttcctcagc

SEQ ID NO: 6052 - DNA, 110 bp, homo sapiens
gtacgtagtttatcattgggtcttgctcctatgttctgtatctgtgtctttacatttgaagagggtctcctgtacgtactttatcattgggtcttgctcctatgttctgt

SEQ ID NO: 6053 - DNA, 88 bp, homo sapiens
ggagcgtctctctcacacctccctcggtgacggggagggaaggagggccgggcccccaggagcgtctctctcacacctccctcggtga

SEQ ID NO: 6054 - DNA, 101 bp, homo sapiens
tcactgctccccagctcctgatctgcccccaccccgtggccctgtccagggtttgccgtccctcacactgtcaggtcactgctccccagctcctggtctgc

SEQ ID NO: 6055 - DNA, 109 bp, homo sapiens
aaggagggaacaggtggaggggtgtggggtcacccagggccaaagggggaacaggtggaggggtgtggggtcacccagggccaaagggggaacaggtggaggggtgtgg

SEQ ID NO: 6056 - DNA, 125 bp, homo sapiens
ccccgtggggggctcatcccacccacagtaagagcatcctggtgaatgaggaacggcgacctgcagggccacacgaatgccgtccccgtggggggctcatcctacccacagtaagagcatcctgg

SEQ ID NO: 6057 - DNA, 96 bp, homo sapiens
ccgcagggcctgtgccttcgcctataacagtccctcggcctgtgggggaccccaaagctcccagccgccctccccgcagggcctgtgccttcgcct

SEQ ID NO: 6058 - DNA, 74 bp, homo sapiens
gagacgcgtggggccacagctcagggaggtaagaaacagcagacaacaggagagacgcgtggggccgcagctca

SEQ ID NO: 6059 - DNA, 99 bp, homo sapiens
cagctgggctcctgcagaagcctctgtgagagaaggtggggtgccctcgggggctcccagggtgatcagctgggctcctgcagaagcctctgtgagaga

SEQ ID NO: 6060 - DNA, 96 bp, homo sapiens
cactcctgcaggcatgctcacatccacacacacgtgcatgcacaattcacacactcaggctcacccacactcactcctgcaggcacgctcacatcc

SEQ ID NO: 6061 - DNA, 90 bp, homo sapiens
tgctgggcagcaggggtgtggaaggacggtgcagctagggtgcacaccccttctgcgggtgcgtgctgggcagcaggggtgaggaaggac

SEQ ID NO: 6062 - DNA, 74 bp, homo sapiens
agctgcagccctgagacctgattgtaccatggaaggtggggtggctcctgcagctgtagccctgagacctgatt

SEQ ID NO: 6063 - DNA, 76 bp, homo sapiens
ccccctgcctttccctggctcacagaggaggtctgggtgtgtccaagtctggcccccctggctttccctggctcac

SEQ ID NO: 6064 - DNA, 92 bp, homo sapiens
actgagataaatgcatatctgattttgtaaaataaatatctgaaaataattcagtcatccttcttcttactcagataaatgcatatctgatt

SEQ ID NO: 6065 - DNA, 74 bp, homo sapiens; identical to SEQ ID NO: 6062

SEQ ID NO: 6066 - DNA, 222 bp, homo sapiens
aaaggagaccggaagacctcagaaatagcctcagaagcaaagtctctccttgccctcctgtctcactcctcttactcccccaaagcaagtcatagaaaccagaatccccctttccccaaggcgggtcacagataatagaaaagcaagccataatacctaaaaagtattacctcctactcaaacatatacctctcccccaaagtaagccataatacctaaaaa

SEQ ID NO: 6067 - DNA, 261 bp, homo sapiens
aaactgaggaaagaaagaaagaaaaagagagagagagagagagggagggagggagggaggggggaaggaaggaaggaaggaaggaaagaaagaaagaaagaaagaaagaaggaaggaaggaaggaaggaaggaaggaaggaaggaaagaaagggaaagaaagaaagagagggaaggaaggaaagaaagggaaagagaaagaaggaaggaaggaaggagaggaagggagggagaaagagagagaaagggaaaaagaaaggaa

SEQ ID NO: 6068 - DNA, 125 bp, homo sapiens; identical to SEQ ID NO: 6

SEQ ID NO: 6069 - DNA, 81 bp, homo sapiens; identical to SEQ ID NO: 4

SEQ ID NO: 6070 - DNA, 92 bp, homo sapiens
cttccattcctcgccctgcccccagaggccaggagctctgcccttgacctgtattccacttactccaccttccattcctcgccctgtcccca

SEQ ID NO: 6071 - DNA, 95 bp, homo sapiens
ccaaggcaggaggattgcttgagactgcaggtgcggtagctcacacctgttatcccgtagcacgttgggaggccgaggcaggaggattgcttgag

SEQ ID NO: 6072 - DNA, 91 bp, homo sapiens
ttaatttcagccgttccagcagatgtgcactgatgctgtgtcgtggcttggatttgtgatgcttttaatttcagccgttccagcggatgtg

SEQ ID NO: 6073 - DNA, 114 bp, homo sapiens
ggggcagtcggtgcaggctgaggggcattctcggaacccctgtgcccagcgcggcccctggaccccctcattctccccggggggcagtgggtgcaggctgaggggcattctcgg

SEQ ID NO: 6074 - DNA, 82 bp, homo sapiens
taagacttcccaataaaaggacctggggctccctgcctggcacccaggcctcactctcttaagacttgccaataaaaggacc

SEQ ID NO: 6075 - DNA, 85 bp, homo sapiens
tttcaccatgttggccaggctggtccccaacgcctgacctcaagtgatccacctgttttcactatgttggccaggctggtcccca

SEQ ID NO: 6076 - DNA, 116 bp, homo sapiens
caagaggccagcctctgctccgcgcctctctatccccagcaggtgggaaagggtgcttccagggtactgctatctcccccgctccaagaggccagcctctgctccccgcctctcta

SEQ ID NO: 6077 - DNA, 87 bp, homo sapiens
gctggggatcgcccaggctcagggagcagtgctccctacaaggaggcaggggtaaggttggtgctggggatggcccaggctcaggga

SEQ ID NO: 6078 - DNA, 91 bp, homo sapiens
tgtgagcagtggggcctgtagatggggccgggtcctctctacggtcctgggagaccggcgctgtgagcggtggggcctgtagatggggccg

SEQ ID NO: 6079 - DNA, 75 bp, homo sapiens
gctgtgcccaggagccccccaggtccacactcactgctgcactgtggagtttgctgtgcccaggagccccccaag

SEQ ID NO: 6080 - DNA, 152 bp, homo sapiens
cccgctccccatggccttgggtcgcctggcccctgtctgctgctgctggcatcctcgccccctcacgatggctgctctactgttctcagcctgcaggcctagcccgctccccatggccttgggtcccctggcccctgtctgctgctgctggc

SEQ ID NO: 6081 - DNA, 117 bp, homo sapiens
ctggccaaccactgcctgccaccgcccccgccaacgtgaccctgctggccaaccactgcctgccaccgcccccgccaatacgaccctactggccaaccactgcctgccaccaccccc

SEQ ID NO: 6082 - DNA, 114 bp, homo sapiens
gatgttagaagatgataaacacaacagagaaatatcattctagtggatagagatcgaaaataaacacgaaatttggtgagatgttagaagatgataaacacaacagagagatat

SEQ ID NO: 6083 - DNA, 86 bp, homo sapiens
ctctttaacaaagatcagactgtgtgtggggctgggcttgttgctgtgggtcagttactctttaacaaagatcagactctgtgtgg

SEQ ID NO: 6084 - DNA, 99 bp, homo sapiens
ggcttatgcctgtaatcccagcacttcgggataataagtgctgggattacagcacttattataagccaggctcatgcctgtaatcccagcacttcggga

SEQ ID NO: 6085 - DNA, 76 bp, homo sapiens
tgcatggctgggttcctcctaggggacctagcatgcctggacgctgtgggggtgcatggctgggttcctcctaggg

SEQ ID NO: 6086 - DNA, 84 bp, homo sapiens
ttcctccacacccacccctgcctcctctgcttctcggctctctcagggccaggcccacctttcctccacacccacacctgcctc

SEQ ID NO: 6087 - DNA, 88 bp, homo sapiens
cccccccaccctgctctttcaggaggatctaggcagtcatcagccccccacagtcatcagcccccctcaccctgctctttcaggagga

SEQ ID NO: 6088 - DNA, 82 bp, homo sapiens
ttggttcagacacaaatcatcataattaactttgtgaatggttttaggaaactcagagtttggttcagatacaaatcatcat

SEQ ID NO: 6089 - DNA, 146 bp, homo sapiens
tggtgagggtggcacgggggcgggggaacagtcaggacaaggtgccgggtagggtggggggagcacaccaagcgtgcctagtctggtccaggcaaggcagtggtgagggtggcacgggggcgggggaacagtcaagacaaggtgcc

SEQ ID NO: 6090 - DNA, 98 bp, homo sapiens
tcacctgcagtctgtcttcaatcagagctgagtcagtaagcacaggccagcggccccagagaggccctccccattcacctgcagtctgtattcaatca

SEQ ID NO: 6091 - DNA, 90 bp, homo sapiens
gctagaaggcaacccagccgctgccagaaggaagggactgtgccctctcatgggggcagctagaaggcaacccagccactgccagaagga

SEQ ID NO: 6092 - DNA, 147 bp, homo sapiens
gtgacggggtggccagcagggacgcgccccaggtgggcagctgtggcagagcagcgacccgcggcggggcggcatccccagctggttcgggccgtgacggggcggccagcagggacgcgccccaggtgggcagctgtggcagagcag

SEQ ID NO: 6093 - DNA, 114 bp, homo sapiens
gtgcctgggggcaggtgggtgacactggacagctcccatcatggaaggggcgctgaggctccattccccagcgtgttgagcccggtgcctgggggcgggtgggtgacactggac

SEQ ID NO: 6094 - DNA, 357 bp, homo sapiens
ggggccaagcaggtgggtgagggcagggcaggagcaagcaggggagatgcagacggggcggggccaagcaggtgggtgagggcggggccaagcaggtgggcggggagggggcggggccaggcggggtaaatgcacactggaacggggccaaacaggtgggcgaggagggggcggggccaagcgggatagatgacacgagcggggctaagcaggtgggctcgggcgggggtgggggtgggggcgggggcgcaggcgggggcgggggcgcggacaggccaagccagggggtgaggcggaggcagggccaggccggtccgtggggagagggcgggccaagccggtgggcgcgggcaggga

SEQ ID NO: 6095 - DNA, 104 bp, homo sapiens
aaggtcgtggtctgtgacgtaggatcggggaggccacctcagaggccttttgctgctcagagaacactgggctgtaaggtcgtggtctgtgacgtaggatcggg

SEQ ID NO: 6096 - DNA, 182 bp, homo sapiens
catggagtaatggcgaaggccagagccctccccgctccttccagatcacccttctgtcctctgcagcatcatggagtaatggtgaaggccagagccctccccgctccttccaggtcacccttcagtcctctgcagaatcatggagggatggtgaaggccagaccctccccgctccctccaca

SEQ ID NO: 6097 - DNA, 91 bp, homo sapiens
aaggggattgtgcagagaaacggggagagaggagcactgggagcttggtccagtgggtgcccccacagaaggggactgtgcagagaaacgg

SEQ ID NO: 6098 - DNA, 95 bp, homo sapiens
gtccacaacccagcctcctcccaggtagggggcagccgggccccttccccttctgggtaactcggcagtcaggtccacaccccagcctcctccca

SEQ ID NO: 6099 - DNA, 92 bp, homo sapiens
aagaaagagaacaaatatacagaaactgttgggttttgaaatgccatggaaggaataaaaaataaaagaaagagaacaaatatatagaaact

SEQ ID NO: 6100 - DNA, 158 bp, homo sapiens
caccaatcggcactctgtatctagctcaaggtttgtaaacacaccaatcagcaccctgtgtctagctcggggtttgtgaatgcaccaatcgacactctgtatctagctactctggtggggatgtggagaatctttgtgtctacactctgtatctagct

SEQ ID NO: 6101 - DNA, 277 bp, homo sapiens
agtatacataactaatatatattatattatatatagttatatataatatataactaatatgcctaaaggtatatatataaatataactaatatgcctaataatataactaatataactaataataatataactaatatgcctaaaggtatatatataaatataaaacaaacatacaaatatatttgaaatataaaaatattttaaaaatataaactttttataaatatataaaaatatattttaaaaatataaataacactatacatatatatataa

SEQ ID NO: 6102 - DNA, 88 bp, homo sapiens
caaacagtttggtaataagggtgaagaggtggcagagagctgaggaatgtgccattttttgcaaacagtttggtaataaggctgaaga

SEQ ID NO: 6103 - DNA, 89 bp, homo sapiens
catgagacttaggggactatcaggtggtatatctttgttactattcatatcctttttcatgagacttaggggactatcaggtggtatat

SEQ ID NO: 6104 - DNA, 95 bp, homo sapiens
gttgaggggtacttgccccctcccagaaaagcgggacttgccactaagggtgaaggagaaggtgttgaggggtacttgcccctctcccagaaaag

SEQ ID NO: 6105 - DNA, 129 bp, homo sapiens
ggaggtggggccaggccagactcatgtcagaaggcccctcagtgagaagcgaagaagcaatctgtctttattatgaggaactaggaggtggggccaggccagactcatgtcagaaggcccctcagtgag

SEQ ID NO: 6106 - DNA, 89 bp, homo sapiens
gggacttgccactaagggtgaaggagaaggggttgaggggtacttgcccctgccccagaaaagcgggacttgccgctaagggtgaagga

SEQ ID NO: 6107 - DNA, 93 bp, homo sapiens
gctcctctcattagccgtcatcagaaatgtcttttattttcctatctaatgggattggcgctcctctcattagccgtcatcggaaatgtcttt

SEQ ID NO: 6108 - DNA, 85 bp, homo sapiens
tcatgcgtacactggcgctcagtcccactggctcccccacatgtacacacactcacactcatgcatacactggcgctcagtccca

SEQ ID NO: 6109 - DNA, 126 bp, homo sapiens
tgataaatgtccatgaaatcttcacaatttatgttcagagactgcagtaaagacaggcgtaagaaattataaaagtattcattttgggaactgataagtgtccatgaaatcttcacaatttatgtt

SEQ ID NO: 6110 - DNA, 107 bp, homo sapiens
cacatgaaactgtaactatttgagaggtcagtgctaggattggtagtctgtttattaataggaagatagtgtgtacacatgaaacggtaactatttgagaggtcagt

SEQ ID NO: 6111 - DNA, 136 bp, homo sapiens
cccacttcctctccaattactcttttgaaaaggaaataactgagctgggtatgataaatatgggaataaagggtgactttatttatattccccacttcctctccaattactcttttgaaaaggaaataactgagct

SEQ ID NO: 6112 - DNA, 99 bp, homo sapiens
cactcaccagactatggaggattcaccaccagactgggaagcaacagtctgggctccagagttggacactgcactcaccagactatggaggattcacca

SEQ ID NO: 6113 - DNA, 106 bp, homo sapiens
ccactgcatggtgtctgtcttggtttggctccatcaggggtcttggttttcctgtagccttgtgtggaggtgtctgtagctccactgcagggtgtctgtcttggtt

SEQ ID NO: 6114 - DNA, 100 bp, homo sapiens
atatacacatacgaccacattaaactgaaacagtagctagtcatatatcaatgcaaattacaggagtataaatatacacatacaaccacattaaactgaa

SEQ ID NO: 6115 - DNA, 186 bp, homo sapiens
agctaggtacagagtgtcgattggtgcattcacaaaccttgagctaaacacagggtgctgattggtgtgtttacaaaccttgagctagatacagagtgccgattggtgtatttacaatccttgagctagacataaaggttctccacttcctcaccagagcagctagatacagagtgtcgattggtg

SEQ ID NO: 6116 - DNA, 150 bp, homo sapiens
gattgtcccatcatctcttcagctctcagcagagaggaggccctacagtgggaagctcctctctttaggcaggttgtcccatcatctctgcatctatcagcagagagggtaactcctctctgtaactggttgtcccatcatctctccatc

SEQ ID NO: 6117 - DNA, 87 bp, homo sapiens
ttttactgcagtactaaattctcagaactctatctaatgggccagtctctttactgttttactgcagaactaaattctcagaactct

SEQ ID NO: 6118 - DNA, 88 bp, homo sapiens
ccaccatccctgggctcttggtgccatggaagccttgcgtgctggactggatgccttctcgtccaccatccctgggctctcggtgcca

SEQ ID NO: 6119 - DNA, 184 bp, homo sapiens
ctttgtaacttcgcttcagcctctggttggttgttggcaaacagactgattacgggccaaatcttcatttgcatagaagtgcagctttgtaacttcacttcagcctctgattggttgctttccacaaccaatcagatgtttgcataggagagtgacctttgtagcttcacttcagcctctgatt

SEQ ID NO: 6120 - DNA, 141 bp, homo sapiens
atcagaaataagaggcctgggagggaaggcgggggctctgggctttttaaaggggcctcagcacccaactgggctctggatggctgagaagctgagatcagaaataagaggcctgggagggaaggcaggggctctgggctt

SEQ ID NO: 6121 - DNA, 79 bp, homo sapiens
ttcttcctgccttattgcttcagggtacaaatatgttccagggtactattgaattcttcctgccttattgcttcagggt

SEQ ID NO: 6122 - DNA, 89 bp, homo sapiens
actccagcctgggcaacagagtgggactctgaaaaaaagaaagaaaaagagaaagagagagagagtactccagcctgggcaacagagtg

SEQ ID NO: 6123 - DNA, 80 bp, homo sapiens
caagaattcggctggcccttagcatgaggagaaatttgtggaagggtactctagcaagaattcggctggcccttagcatg

SEQ ID NO: 6124 - DNA, 135 bp, homo sapiens
gctctttttttgaaacaaagaaacttttcttggaatcctcatcatacaaaatcaaggcataaactttggaggaagaagagagaacacctctcctggctctttttttgaaacaaagaaacttttcttggaatcctc

SEQ ID NO: 6125 - DNA, 92 bp, homo sapiens
atatgattatatatgttaaaaatatataattatatgaatataaagcaagatcctgtctgtattttatacatataaaacatatatgattatat

SEQ ID NO: 6126 - DNA, 90 bp, homo sapiens
ctttgctccatcactctagtggaacaggaagcatgctgttccactagagtgggaccaaatgctcctcctttgctccatcactgtagtgga

SEQ ID NO: 6127 - DNA, 125 bp, homo sapiens
ataaatgtccatgaaatcttcaaaatttatgttcagagattgcagtaaagacaggcgtaagaaattataaaagtattaattgggggaactaataaatgtccatgaaatcttcagaatttatgttc

SEQ ID NO: 6128 - DNA, 127 bp, homo sapiens
ccttgtgagcatacatgggcatgcttcattctagcctgcagacaagtgctatagagagatggcagagatgctcccaggctcccctagtaccttgtgagcatacatgggcatgctccattctagcctg

SEQ ID NO: 6129 - DNA, 88 bp, homo sapiens
tctgtggaggctctaggagatgatctggggcaaggtgaaggtattggcagggtgcattccttctgtggaggctgtaggagatgatctg

SEQ ID NO: 6130 - DNA, 105 bp, homo sapiens
catagatcaatggaacaaactagagatttaatataaagctacagtaattaagaaaatgtggtattgactaaaggatagatacataaatcaatggaacaaactaga

SEQ ID NO: 6131 - DNA, 108 bp, homo sapiens
accagcctgggcaacatagggagaccccatctctgctgaggtgtgggaggatcacttgagcccaggagtatgagaccagcctgggcaacatagggagaccctatctct

SEQ ID NO: 6132 - DNA, 121 bp, homo sapiens
catatacacatatataaaatgcatttttagtaacaataataaatgcaaaacagtggctaggcgctcagtgctagacattcattatatacatatacacatatatgaaatgcatttttagtaa

SEQ ID NO: 6133 - DNA, 80 bp, homo sapiens
ttgctgcattccctgtagggactcatttcccatctgcgggctcatttccatgaagttgctgcattccctgtggggactca

SEQ ID NO: 6134 - DNA, 80 bp, homo sapiens; identical to SEQ ID NO: 6133

SEQ ID NO: 6135 - DNA, 127 bp, homo sapiens
ggtgtggtggcgcacgcctgtagtcccatctactcagccttgcctgaccaacacggtgaaaccccgtctctactaaaaatataaaagccaggtgtggtggcgcacgcctgtggtcccatctactcag

SEQ ID NO: 6136 - DNA, 104 bp, homo sapiens
atacataattacttcttaaccccacattaactataaaataaatggtacatatgtatatattatatatatatatatataaaatacataattacttcttaccccca

SEQ ID NO: 6137 - DNA, 115 bp, homo sapiens
atgtaagctccatgacagtgaacacttggtcttgtccccccactgtccctggtgtttagatattatctgcctccccactagaatgtaagctccatgacagtgaacacttgatctt

SEQ ID NO: 6138 - DNA, 93 bp, homo sapiens
tgcagctgactaaaagtggtgggacttctggcttctgcagctgactagaagtggtgggactcctggcttttgcagctgactagaagtggtggg

SEQ ID NO: 6139 - DNA, 109 bp, homo sapiens
ttaagtttccaaatataagaggaaaatgattttaagttaagtttccaaatataagaggaaatataagaggaaatggttttaaattaagtttccaaatataataggaaaa

SEQ ID NO: 6140 - DNA, 97 bp, homo sapiens
tctctcaccactcacactctggggactcacagttttctgcctggcttatggatataccatggaggcaatctctccccactcacactctggggactca

SEQ ID NO: 6141 - DNA, 78 bp, homo sapiens
gaatacccaaaaatcttctagtgttggataatgcaccctaaaaggctttatctgaataccccaaaatcttctagtgtt

SEQ ID NO: 6142 - DNA, 191 bp, homo sapiens
attggtgtgtttacaatccctgagctagacacaaaagttctccaggtccccactagattagctagatacagagtgtccattggtgtatttacaatccctgagctagacacagagtgctgacttgtgcatttacaaaccgtgagctagatacagagtgctgattggtgtatttacaatcccttagctagaca

SEQ ID NO: 6143 - DNA, 83 bp, homo sapiens
tcttagcagagagggtagctcctctctgcaagcaggtcatcccaacaactgttcagttcttagtagagagggtagctcctctc

SEQ ID NO: 6144 - DNA, 123 bp, homo sapiens
tgtatttattgctttatctaatatggtcaaaatgataaccagtactagtgaggaaaagagatgatatatataacataattttatatatgtacttattgctttatctaatatggtcaaaatgat

SEQ ID NO: 6145 - DNA, 75 bp, homo sapiens
aaaggttctccaaggccccatcagattagtgagatacagagtatggacacaaaggttctccaaggccccaccaga

SEQ ID NO: 6146 - DNA, 90 bp, homo sapiens
accagctgcagagaggagctaccctctctgctgagagcttccgagacctgcagagatgtctgaaccacctgcagagaggagctaccctct

SEQ ID NO: 6147 - DNA, 74 bp, homo sapiens
caagtctctagaaagttccaaacatttccacgtcttgtcttctgagccctccaagtctctaaaaagttccaaac

SEQ ID NO: 6148 - DNA, 97 bp, homo sapiens
aggcaggatccctaagaggggctgcaatgagagagccaatgatgtactgtgtacatgctcctaaggggaggccaggcaggatccctaagaggggctg

SEQ ID NO: 6149 - DNA, 77 bp, homo sapiens
ttgtctgaatagttcatatgttctacagccatatcacactgaatgcaaccaatcttgtctgaatagttcatatgttg

SEQ ID NO: 6150 - DNA, 104 bp, homo sapiens
tcggatttagtggcccttaccaacgcattctcgaaaacctgtaccctgtcctcttagaccacaaagaagaccaggaaaaatcggatttagtggcccttaccgac

SEQ ID NO: 6151 - DNA, 83 bp, homo sapiens
ttttgagattttgcgtcacttcagtggagcccctcactgctccaaccaaacaaaatttttttgagattttgcttcacttcagt

SEQ ID NO: 6152 - DNA, 90 bp, homo sapiens
ctattttaaataatttcagagggctagcaaaaaagggtaagcaggctaaggaggtttaagattgtctactttaaataatttcagagggct

SEQ ID NO: 6153 - DNA, 105 bp, homo sapiens
ggacttggagaacctttatgtctagctggaggattgtatatgcgccaatcagcactctatatctagctaatctggtcaggacttggagaacctttatgtctagct

SEQ ID NO: 6154 - DNA, 113 bp, homo sapiens
ttttacagagtgctgattggtccactttatagagtgctgattggtatgtttttacagagtgctgattggtgcgtttataatcctttagctagacacagagtgatgattggtac

SEQ ID NO: 6155 - DNA, 124 bp, homo sapiens
aacataaattatgaagatttcatggacatttattagttccccaaattaatacttttataatttcttacacctgtctttactgctatctctgaacataaattgtgaagatttcatggacatttat

SEQ ID NO: 6156 - DNA, 95 bp, homo sapiens
actgggctctaggggcctgacttcaagtcccagcacatcactcacagtgttccagaaagaactgggctctatgggcctgacttcaagtcccagca

SEQ ID NO: 6157 - DNA, 88 bp, homo sapiens
cagatcctcccagtagaggatctggatatataagatctgatagttgtaaatagctctgaactcagtatcctcccagtagaggatctgg

SEQ ID NO: 6158 - DNA, 164 bp, homo sapiens
ccagtctggaaagaaagaaagaaagaaggaaagagagagagagagagaaagaaagaaagaaagaaagaaagaaagaaagaaagaaagaaagaaagaaagaaagaaagaaagaaggcaggcaggcaggcaggcaggcaggcagacaggcaggaaagaaagaaaga

SEQ ID NO: 6159 - DNA, 99 bp, homo sapiens
taatattttaggctttgaagctggctttggagaaaaaaggttctggtttctataggggaggttagagtaatattttaggctttaaagctggctttggag

SEQ ID NO: 6160 - DNA, 108 bp, homo sapiens
ccacctctctatgatgttgtgattctaacatgtattctaccctttgcccactgtgcaacctgataagtgtatcagtgaaatccacctctctatgatgttgtgattcta

SEQ ID NO: 6161 - DNA, 80 bp, homo sapiens
ttacataagatgacatagacaaatggggcagagaaaaaatgtagataatctgcatttttacataagataacatagacaaa

SEQ ID NO: 6162 - DNA, 120 bp, homo sapiens
gcatcaccttctgaaaatattacccaatattttgaaccagaatttatggtaaaacagaattcaaccccatatctatctttctagacatgcatcaccttctgaaaatattacctaatattt

SEQ ID NO: 6163 - DNA, 130 bp, homo sapiens
cagacaggtggagatacaaaatattcttattatgtattaagctgaagtcttactatatctgagttcagaattataaaatagataaagcaatcagacagacaggtggagatacaaaatgttcttattatgt

SEQ ID NO: 6164 - DNA, 110 bp, homo sapiens
ggagggagccaggacacagctcagcttgctggtgcccagagaaagagaaagagagtcagatacgtccatctttacagatggacggagggcagccaggacacagctcagct

SEQ ID NO: 6165 - DNA, 82 bp, homo sapiens
ttttgaactttatatatatggcatcttatagtatgtactcttttgtgttttgctcctttttgaactttatatatatggtatc

SEQ ID NO: 6166 - DNA, 74 bp, homo sapiens
gagacttttgctgatacatacttgtatgtaattcagagaccagtaattcatgagacttttgctggtacatactt

SEQ ID NO: 6167 - DNA, 126 bp, homo sapiens
tgcagccacccagctgcagctgcagacccaggcatccctgtgctcttgggagccaggagcagaaaggagccccaccctcccaggtgcaactgcagccgcccagctgcagctgcagacccaggcatc

SEQ ID NO: 6168 - DNA, 108 bp, homo sapiens
tttttcttacccgtcctcaatgtaaactttacattgtaagtaagaaataaacttttatatgagtaagaaataaacctctttttcttacccatcctcaatgtaaacttt

SEQ ID NO: 6169 - DNA, 79 bp, homo sapiens
taacagtaattgataatacattaaatttgagacaacataagcctaaaaatagtaacagtaattgataacacattaaatt

SEQ ID NO: 6170 - DNA, 88 bp, homo sapiens
catttttctgaaactaattaaaaatcagaagttctgccgtgatttccaattaactttccatttttctgaaactaattaaaatcagaaa

SEQ ID NO: 6171 - DNA, 99 bp, homo sapiens
ggagtcacagagcttccacccaaagggtgtctgattcttttctacatcttcctgtgttcataggagattccaggagtcacagagcttccacccaaaggg

SEQ ID NO: 6172 - DNA, 125 bp, homo sapiens
tataagaaaatatccatattttctagaaatgcataatgaagtatttagttaggcatcataatggcacataaacattatataagaaaatattcatattttctagaaatgcataatgaagtatttag

SEQ ID NO: 6173 - DNA, 88 bp, homo sapiens
gaggttgcagtgagatgagatcgagccattgctgaggcaggagaatcgcttgaacccgggaggcagaggttgcagtgagctgagatcg

SEQ ID NO: 6174 - DNA, 115 bp, homo sapiens
tcagctcattggctggaggcagtggcagtcctgtttcttaatggttccgtaagccatgtgggacacattcaatttccatggtggagctcagcttattggctggaggcagtggcag

SEQ ID NO: 6175 - DNA, 125 bp, homo sapiens
aatgtaaataataatacaaagggtaaaatataagagctcaagaaccctttaagtaaaaaactgtatttcaatactttctaatgtaaataataatacaaagggtaaaatataagagctcaagaacc

SEQ ID NO: 6176 - DNA, 133 bp, homo sapiens
acaagctaaccctttgtttacaaactaaccctttgtttactccattttgtccagaaaatacaacaatcagttttggcaaagggcttcactgtgtaacaaggggacaaactaaccctttgtttactccattttg

SEQ ID NO: 6177 - DNA, 131 bp, homo sapiens
actaagtgtgttgaacaggagatcatgactgcctccccacagaggatctgtcccactggccacctcagagccagcaagcaggaaaaactaagtgtgttgaacaggagatcatgaccgcctccccacagagg

SEQ ID NO: 6178 - DNA, 105 bp, homo sapiens
tttaacaaaataccaaaatgttactctgaagtcttgattgctcctttttttttttcttctccctgtccgtttaacaaaataccaaaatgttactctgaagtcttg

SEQ ID NO: 6179 - DNA, 105 bp, homo sapiens
tgagcaagcccacctcagccctctttactccattactgtttactctatagataagatccatttctctttactccaatgagcaagcccacctctgccctctttact

SEQ ID NO: 6180 - DNA, 107 bp, homo sapiens
gctactggaaaaagttttcctcttcctatgatccccgtcatggtgaattcagcgacataagcagctcctgagctactggaaaaagttttcctcttcctgtgatcccc

SEQ ID NO: 6181 - DNA, 108 bp, homo sapiens
tatcgtaaatacatcttatgacacttgatttctattgaaatcaatcgtaaatacgatagatttctattgaaatctatcgtgaatacatcttatgacacttgatttcta

SEQ ID NO: 6182 - DNA, 89 bp, homo sapiens
ttctagaccagctaaatcaactggtgtcggtgggcccagccagaaatgcagttgttcaggccccgttctagatcagctaaatcaactgg

SEQ ID NO: 6183 - DNA, 80 bp, homo sapiens
cagcctattctcagaatctttgaataacttttccaggcacacaccaccgctcacagcctattctcagattctttgaataa

SEQ ID NO: 6184 - DNA, 130 bp, homo sapiens
tcttttgaaggatttattttttaatttttttgtagagatggggccttatcatcttgggatttatttcaaaaaataaatccatcttttgaaggatttattttttaatatttttgtagagatggggccttat

SEQ ID NO: 6185 - DNA, 111 bp, homo sapiens
attccatggattcctgaaagaagttgttggcattttttaaaaataggatgtaaagtctgaaatatatctatttcaagttcaacaattccatggattcctgaaagaagttgt

SEQ ID NO: 6186 - DNA, 79 bp, homo sapiens
cttttggcttattaaatgaaactataaacttttatataaactttatatataaacttttggcttattaaatgaaactata

SEQ ID NO: 6187 - DNA, 125 bp, homo sapiens
ctctgcagtgtatgagctctggggacaagggtggctggggaaagaggctcacagccacagtggcagggataggagtcatgagctctgcagtgtgtgagctctggggacaagggtggctggggaaa

SEQ ID NO: 6188 - DNA, 83 bp, homo sapiens
tttcttatagattctggatattacattgaagtttttttttttcttttttttttttttacatttcttatagattctggatatta

SEQ ID NO: 6189 - DNA, 61 bp, homo sapiens
tgaatatatatatatatatatatacacacacatatgtatatatatatatacacatatatat

SEQ ID NO: 6190 - DNA, 76 bp, homo sapiens
ttatttttatataactatttttaaaatagttatatgtaacttttatatgtaactttttttaaaaagttatatgtaa

SEQ ID NO: 6191 - DNA, 109 bp, homo sapiens
tgagcgcaactattctgatcagcagggtccagggaccactgcaggttcttggggaagaggtgtttctgctgctgtgtcagtgagtgcaactattctgatcagcagggtc

SEQ ID NO: 6192 - DNA, 108 bp, homo sapiens
agctagacataaaagttctccaagtccccaccagattagctagatagagagtgctgattggtaaatatataatccttcagctagacataaaagctctccaagtcccca

SEQ ID NO: 6193 - DNA, 87 bp, homo sapiens
atcaatatcacatatgaatatatgagaaatatatttaaaaaatcaaggacagtttcactatcaatatcacatataaatatatgagaa

SEQ ID NO: 6194 - DNA, 138 bp, homo sapiens
tattctgtatatcttatataaaatattttttaataatctattactcctctcaggctgtatacacacacatatacacaaaaaaagatattctgtatatcttatataaaatattttttaataatctattactcctctcag

SEQ ID NO: 6195 - DNA, 105 bp, homo sapiens
tgacagtatactacaaacacaatctcattgcagataacgtaatcctcatcctcaaatttacctctgcgagtactttttccgtgacaatatactacaaacacaatc

SEQ ID NO: 6196 - DNA, 108 bp, homo sapiens; identical to SEQ ID NO: 2484

SEQ ID NO: 6197 - DNA, 123 bp, homo sapiens
gaacataaattgtgaagatttcatggacatttattacttccctaataatactcttataatttcttatgcctgtctttacttcaatctctgaacataaattgtgaagatttcatggacatttat

SEQ ID NO: 6198 - DNA, 119 bp, homo sapiens
tgtttctgctgctgtgtcagtgagtgctactattcccatcatcagagtccagggaccattgcaggttcttgggcaggaggtgtttgtttctgctgctgtgtcagtgagtgcaactattc

SEQ ID NO: 6199 - DNA, 123 bp, homo sapiens
tctctaccccttttccactttcctggggggcaaccactccccaccccttctccactttcctgggggacaaacaccccccaccccttctctccattccccacccgttctccactttcctggggg

SEQ ID NO: 6200 - DNA, 75 bp, homo sapiens
ggttggttatatgatgataaggttttacatcccaaatccttttattttgaggttggttatatgatgatacggttt

SEQ ID NO: 6201 - DNA, 92 bp, homo sapiens
aagttccaaactttcccacatcttcctgtctttggcaccctccacaactctaggaagttcaagttccaaactttcccacattttcctgtctt

SEQ ID NO: 6202 - DNA, 197 bp, homo sapiens
atttcatattaaaaatatttttaatattaaatattaatttcattataaatactaatttcattataaatagtagtaatcatactaatcatatatttagatttataatgaaatattaatttcattataaattgttaatatgaaaatattttaatatgaaacaaattaccattaaatttaatattaaaataataatgtaa

SEQ ID NO: 6203 - DNA, 97 bp, homo sapiens
atgtcctagaagaaagttttctgatggaaaagcagtatagaagattggtgaaggattattcatgtcctagaagaaagttttctgatggaaaagcagt

SEQ ID NO: 6204 - DNA, 82 bp, homo sapiens
taaagcccgccaccagatgcagctgtacaattaaagtacatcaactcacctgccacagtaaagcctgccaccagatgcagct

SEQ ID NO: 6205 - DNA, 89 bp, homo sapiens
tatattgatattatttttctttagtcgtatgccttacttccacatttgttatgaacccaataatatattgatattatttctctttagtc

SEQ ID NO: 6206 - DNA, 102 bp, homo sapiens
tagagatttatggaactttgaacttgagggagatgatttagggtaaagagactggtggcattttgcccctgtcctagagatttgtggaactttgaacttgag

SEQ ID NO: 6207 - DNA, 118 bp, homo sapiens
ggtgagcgcaactattctgatcagcagggtccagggactgttgcgagttcttgggcaggggttgtttctgctgctgcatcggtgagcacaactattctgatcagcagggtccagggac

SEQ ID NO: 6208 - DNA, 103 bp, homo sapiens
ttcaggatctgctcttttaacctccccgtctagagtatgtggtacagtcatccctcaatatccatgggaaattggtttcaggatctgctctttttacctcccc

SEQ ID NO: 6209 - DNA, 81 bp, homo sapiens
gtttaaatatcatacttactacctataccaatgcaaaggacatttggttggcctaaatatcatacttactacgtaaaccaa

SEQ ID NO: 6210 - DNA, 81 bp, homo sapiens
gcatattccaaagccaaacagaatgaggaaatccagtctggatcaaaagaatgggatggcatattccaaagtcaaacagaa

SEQ ID NO: 6211 - DNA, 126 bp, homo sapiens
atctcatttgcatttctctaatgatcagtgatgttgcattaaaaacttctgctctccgaaagacattgtttttttctcttaaaaaaacaaatctcatttgcatttctctaattatcagtgatgttg

SEQ ID NO: 6212 - DNA, 117 bp, homo sapiens
gcatgtggcccgcgggctgtggattggacaagcttgctctaaagcataggaatttgtgttgggccatattcaaagccttcctgggttgcatgtggcccgcggactgtggattggaca

SEQ ID NO: 6213 - DNA, 83 bp, homo sapiens
ccaccccagtccattaggtccagccccccttgcaccgtgccacagcctccttcccccctgccatcccagtccattaggtccag

SEQ ID NO: 6214 - DNA, 105 bp, homo sapiens
gcaaccaatcagaggctgaagtgaagttacaaaggttacactctataccagcgtatttagcctttgactggttgtgggaagcaaccaatcagaggctaaagtgaa

SEQ ID NO: 6215 - DNA, 113 bp, homo sapiens
cctgtaattccagcactttgggaggccgaggtgggcagatcccttgagctcagaagttcaagaccagcccagcacagtggctcaggcctgtaatcccagcactttgggaggcc

SEQ ID NO: 6216 - DNA, 82 bp, homo sapiens
caggagctggcaggggactcccagtcatcactgccaccagggcgcagcgcctgatcaggagctggcaggggactcccagtca

SEQ ID NO: 6217 - DNA, 99 bp, homo sapiens
cctgtgatcccagcactttgggagactgaagtgggagaataatttgaggccaggaccaggggcagtggctcacacctgtaatcccagcactttgggaga

SEQ ID NO: 6218 - DNA, 100 bp, homo sapiens
attaagaggttaataacaagagttattaagaggttattaagaggttaataaggaacatattgttaataacaaggagcattaagaggttaataacaaggag

SEQ ID NO: 6219 - DNA, 63 bp, homo sapiens
ttcaaagttccacaaccaataagtttaacttattcaaacttcaaagttccacttattcaaact

SEQ ID NO: 6220 - DNA, 123 bp, homo sapiens
aaatgtccatgaaatcttcacaatttatgttcagagattgcagtaaagacaggcataagaaattataaaagtataaattttgggaactgataaatgtccatgaaatcttcacaatttatgttc

SEQ ID NO: 6221 - DNA, 112 bp, homo sapiens
atctgggagctcattgaggccaatggcaaaaatgttaaacattcagcagtttggaaacactgttttcgaagaatctgtgaagggatatctgggagctcattgaggccaatgg

SEQ ID NO: 6222 - DNA, 101 bp, homo sapiens
atatttggagcgctttgaggcctagggtggaaaacgaaatatcttcacagaaaaactagagagaagcagtctgagaaatatttggagcgctttgaggacta

SEQ ID NO: 6223 - DNA, 72 bp, homo sapiens
aaggaaataacttcacataaaaaatagcgctttgaggcctatggtgcataaggaaatatcttcacataaaaa

SEQ ID NO: 6224 - DNA, 107 bp, homo sapiens
gcctatggtggaaaaggaaatatcttcacaaaaaaactagacagaagcattctcagagatatttggaccgctttgaggcctacggtggaaaaggaaatatcttcaca

SEQ ID NO: 6225 - DNA, 85 bp, homo sapiens
atatatcttaaaaaagtttaagagataataagagtaagagagtattttatatctataaaaatatatctttaaaaagtttaagaga

SEQ ID NO: 6226 - DNA, 132 bp, homo sapiens
gattcacttttttgagtatttcttaattatttacttgttctcattgatattttgtaaaaattgttactctgggatacctatcacagattcacttttttgagtatttcttaatgatttacttgttctcattga

SEQ ID NO: 6227 - DNA, 119 bp, homo sapiens
ctctaaacagagctagggcttcttggagaaatggctgtaaacatttttattttccaaattttctctaaaaggaaaccttttatctctaaacagaactagggcttcttggagaaatggct

SEQ ID NO: 6228 - DNA, 106 bp, homo sapiens
ccaatatcgcaggggtgtacacctccccaccccgtgatcttgttcgtaattccctggattgagaggatgatattactgccaatatcgcaggggtgtacacccccct

SEQ ID NO: 6229 - DNA, 141 bp, homo sapiens
tggactcctcttatttgtgagtatgtttaggaagtggtagtgtaagtttttttttacacttctcttaatccctgttacctcctcatgctagaatatctgtggactcctcttagttgtgagtatgtttaggaagtggtagtg

SEQ ID NO: 6230 - DNA, 97 bp, homo sapiens
atcttcagggccatactgctaaaaccatgttttacctcctgttgtaatttttatctcatgtacttcatcttcagggccatactggtaaaaccatgtt

SEQ ID NO: 6231 - DNA, 88 bp, homo sapiens
aaattatttaaaagttctcaactcactttttaatgagttcctccttatttaacgatgacgaaaagaaattatttaaaagttctcaact

SEQ ID NO: 6232 - DNA, 122 bp, homo sapiens
aaatgtccatgaaatcttcacaatttatgttcagagattgcagtaaagacaggcgtaagaaattataaaagtattaatttggggaacaaacaaatgtccatgaaatcttcacaatttatgtt

SEQ ID NO: 6233 - DNA, 186 bp, homo sapiens
ttgtaaatacaccaatcagcactctgtgtgcagctcaagatttataaacacaccaatcagcaccctgtgtctagctcaaggtttgtaaatgcaccaatcagtgctctgtgtctagctaatctagtggggacttggagaacttttgtgtctagctcagggattgtaaatgcaccaatcagtgccctg

SEQ ID NO: 6234 - DNA, 144 bp, homo sapiens
ggggagaagggtagtccagcagagatgagtttcctgagagtttctcaaagagactcaaacccagctttgaaggagtgtttctaatacatagcagggataaggggagaagggtagtccagcagagacgagtttcctgagagtttc

SEQ ID NO: 6235 - DNA, 87 bp, homo sapiens
tcttcatttacatagggcatacacccagtaaatgactttgtaacttaacttcatcctcttcatttacatagggcatacaccaagtaa

SEQ ID NO: 6236 - DNA, 111 bp, homo sapiens
ataagtgtccatgaaatcttcacaatttagagactgcagtaaagacaggcataagaaattataaaagtattaatttggggaactaataaatgtccatgaaatcttcacaat

SEQ ID NO: 6237 - DNA, 92 bp, homo sapiens
cagttgatcttgggccttaagagtcctgggattttgggatatgaaaaataatgatttgggcatacgcagttgatcttgggccttaaagtccg

SEQ ID NO: 6238 - DNA, 105 bp, homo sapiens
catatgtcaaaacatcgcataaaaataaaaaagcaaatataatactaaagtttatgtgtctgtaaaaatgttaaaaatttcatatgtcaaaacatcacataaaaa

SEQ ID NO: 6239 - DNA, 124 bp, homo sapiens
gactgagaaaagtcggatttagtggcccttaccaatgcattctcaaaaacctgcacccttgcctttcctcttagaccacaaagaggactgactgagaaaaatcggatttagtggcccttaccaa

SEQ ID NO: 6240 - DNA, 152 bp, homo sapiens
agtatttttattaataatatcattaaaagggtgagaggaagtgaagttatatatatatacacacacacatacataattgttgagactacatatataaattcagtatttttattaataatatcattaaaagggtgagaggaagtgaagttata

SEQ ID NO: 6241 - DNA, 72 bp, homo sapiens
ttttaggtgtgataatgatatttaataatattaattaattctgttaagtttttaggtgtgataatggtattt

SEQ ID NO: 6242 - DNA, 154 bp, homo sapiens
attttcttaatttcctttttgttcattgctaatatacttaaaacaatgaatgttatatgttggtcatatattctggcactttgaataaaggtaataattattttcttaatttcctttttgttcattgctaatatgcttaaaacaatgaatgtta

SEQ ID NO: 6243 - DNA, 99 bp, homo sapiens
cacccagtaatgcgcctcctgggaaacaggcctaaatactcttcatctgaggggtaaagttccgcacccagtaatgcgcgtcctgggaaacaggcctaa

SEQ ID NO: 6244 - DNA, 98 bp, homo sapiens
ataaagcctgaagatcattttggcagtttttgcagttttgcccatgacacaaaagtatgaagaataagataaagcctgaagatgattttggcagtttt

SEQ ID NO: 6245 - DNA, 98 bp, homo sapiens
attcttttgggtatatacccagtaaagggattgtttgatcaaatgcatgtatccttgtaacagaatgatttacattcttttgagtatatacccagtaa

SEQ ID NO: 6246 - DNA, 746 bp, homo sapiens
attatccataatatcctaggaaaatgggactcctaatatcacggtcagtggacaccctgtgatatgattggtaatatcctaaagagatgttaccactaaggtcacaatgtatgtacgccccctgatattattcgttatatccttggcggatgttactcctaatgtcacacggggtgtactccctgtgatattattcgtaatatcctagggggatgttactttcaatgtcacctggggcgtatatcatgcgtattcaacgcctgtgatactattcctaatatcctaggggcatgttcctcctaatgtcacatggggtgaaccccatatgtgtacacctgctgtgatattattcgtaatatcctaggggaatattctcctgatggcacaggagatgtacaccatgtgtgtcaaccacctgtgtcattattcgtaatatcctagggggatgtttccttgaatggcacaaagtgtgcgcaaaaggtcacagaaggtgtgcaccttgtgatgttatctgcaataccctagaaggatgttactcctaatatgtcacaggggtgtacacactttgatattatttgtaatctcatagagagatatgacttcaaatatcatggtggatgttcacacatagtgtataccctgtgatattattcataatatcctagggagatgcaactcctgatatcacagtgcgtgtacccagtgtgtgtacacccttgatatgagtcgtgatatccagggtaaat

SEQ ID NO: 6247 - DNA, 87 bp, homo sapiens
actttaccttgcagatcactgattacaatgggttgtaatgatgtatttactcatctgtattgccactttaccttgcagataactgat

SEQ ID NO: 6248 - DNA, 120 bp, homo sapiens
tgctgggagtacccggttccctctgggtgggggctgtccgtggcgaagacctcccccacctccggagggcagcccgtgagggtgctgggagcacccggttccctctgggtgggggctgtc

SEQ ID NO: 6249 - DNA, 95 bp, homo sapiens
gcacgcctgtagtcccagctacttgggcatagtggcatgagcctgcagtcccagctactcgggcatagtggtgcacgcctgtagtcccagctact

SEQ ID NO: 6250 - DNA, 112 bp, homo sapiens
ggcatctaggaagaaagtagtaagtgatagcatttatttatttatttattttatttattgagatggagtttcgctcttgttgcccaggcatctaggaagaaagcagtaagtg

SEQ ID NO: 6251 - DNA, 116 bp, homo sapiens
gtgctgggattacaggcgtgagccaccgtgcccggccggtcttgatctcttgaccttgtgatccacctgccttggcctcccaaggtgctgggattacaggcatgagccaccgtgcc

SEQ ID NO: 6252 - DNA, 93 bp, homo sapiens
gtgttagtacaagggacatttatgatgcgtaaaactgagtctctttatgctaagtgcatgtgttagtacaagggacatttatgatgtgtaaaa

SEQ ID NO: 6253 - DNA, 75 bp, homo sapiens
gttcctgccttaactgatgacattccaccacaaaagaagttaaaatggcttgttcctgccttaactgatgacatt

SEQ ID NO: 6254 - DNA, 92 bp, homo sapiens
caggatttccccttcctttatagaaaactgcaggctgtgggtgggccaggcagcttatgcccccagccgcatgatttccccttcctttatag

SEQ ID NO: 6255 - DNA, 142 bp, homo sapiens
taagtaaagcttagtactgacaggcagacatggccaaaatcacagcgacacagtacccagccaagaagtccatttaaagtagacttaaggagacatagtaagtaaagcttagtactgacaggcagacatggccaaaatcaca

SEQ ID NO: 6256 - DNA, 89 bp, homo sapiens
gaggggcctcctctttgccctctgctttcccactcctgggctctggcctgggggtccggaataagaggggcctcctctttgctctctgc

SEQ ID NO: 6257 - DNA, 153 bp, homo sapiens
ctgaagagtgggagacccagaagagctgaaaacccagaagctggagacctggtagagcttgaaacccagaagctggagacccaggagtgccagagacccaggagagctagagacccaggagagctgaagtcccagaagctggagacctggtag

SEQ ID NO: 6258 - DNA, 112 bp, homo sapiens
tttcttgaaagcaaggactcatgggaatccttgaaagcaaggactcatgggaatccttgaaagcaaggacttgcccatctcccccatttcttgaaagcgaggactcatggga

SEQ ID NO: 6259 - DNA, 77 bp, homo sapiens
cctgtctcaaaaataataataataataataataataataataataatgtgagaccctgtcttaaaaataataataat

SEQ ID NO: 6260 - DNA, 93 bp, homo sapiens
tctatgaaaacagaagaaaaacaaaggttaattttgggcacaatttttccagatgttagcctctatggaaacagaagaaaaacaaaggttaat

SEQ ID NO: 6261 - DNA, 93 bp, homo sapiens
tagcctgaaaatgcatggttggcattgatgctgtcgcttctgcacggctagagctgcggggctgagtcttagcctgaaaatgcacggttggca

SEQ ID NO: 6262 - DNA, 110 bp, homo sapiens
gagtctcgttctgttgcccaggctggagtgcagtgatataatcttggcttttgttttgttttgtttttttttgagacggagtctcgctctgttgcccaggctggagtgca

SEQ ID NO: 6263 - DNA, 85 bp, homo sapiens
gcatctacattttcacatcctgcctatttggagcagcaagctggaggtgcgaggggtgaggcatctaaattttcacatcctgcct

SEQ ID NO: 6264 - DNA, 115 bp, homo sapiens
agctagatacagagtgtccacacaaaggttctccaagtccccaccagagtagctagatacagtgtccattggtgcattcacaaaccctgagctagacacagggtgctaattggtg

SEQ ID NO: 6265 - DNA, 67 bp, homo sapiens
gcctggatgtagagcctgggtgtacatctggggctcagggatgagcctggtgtagagcctggatgta

SEQ ID NO: 6266 - DNA, 95 bp, homo sapiens
ggattacaggcatgtgccaccacgcctgactaatttttgactctcctgcctcaccctcccaagtagctgggattacaggcatgcgccaccacgcc

SEQ ID NO: 6267 - DNA, 117 bp, homo sapiens
tgtccctgaaatcttcacaatttatgttcagagattgcagtaaagatagacataagaaataaaagtattaatttggggaactaataaatgtccatgaaatcttcacaatttatgttc

SEQ ID NO: 6268 - DNA, 100 bp, homo sapiens
gcctgggtgacagagcaagaccctgccttaaacaacaataataacaataacaaaacaaggtcccactgcattcatgcctgggtgacagaggaagaccctg

SEQ ID NO: 6269 - DNA, 112 bp, homo sapiens
gaccttttgaggcccaggcccccatcctgacctgcctgtgacatggatggccctgggcgtgggtttcgtgcgaccttttgaggcccaggcccccatcctgaccctgcctgtg

SEQ ID NO: 6270 - DNA, 105 bp, homo sapiens
ttgtgggtggagtcttcgtttgcaacttggtaatttcactccagcctatgaatggttgctgtccacaaacaatcagactgattgtgggtggagtcttcgtttgca

SEQ ID NO: 6271 - DNA, 117 bp, homo sapiens
cagggtccagggaccgttgcgggttcttgggcaggggttgtttctgctgctgcgtcagtgagcgcaactattccgatcaacagggtccagggactgttgcgggttcttgggcagggg

SEQ ID NO: 6272 - DNA, 117 bp, homo sapiens
ctccccgcattgcggggggtgcctcacccccctgcgataggtgccctaagagccaggggaggagaagggctgactcgtactccccgcatcgcggggggtgcctcacccccctgcgat

SEQ ID NO: 6273 - DNA, 75 bp, homo sapiens
gttcctgccttaagtgatgacattccaccacaaaagaagtgaaaatggcctgttcctgccttaactgatgacatt

SEQ ID NO: 6274 - DNA, 105 bp, homo sapiens
ggctggctcttactccccgtaccccgggtggggggcctcacccccctgcgatgggtctcctaagagccgggggagagagtggctggctcttactccccgtatccc

SEQ ID NO: 6275 - DNA, 137 bp, homo sapiens
agccacgcccaacatttgcagacagatccggtgtgaatgctcagctctcacggctttggaggagcctctgctccctgtggccatcgtgtgctcctgagccacgcccaacatttgcagacagatccagtgtgaatgct

SEQ ID NO: 6276 - DNA, 91 bp, homo sapiens
tatctctgcaccccaatcccttatttccatgccctgacctcttatctctgcaccacatgccttatttccacaccccgacctcttatctctg

SEQ ID NO: 6277 - DNA, 80 bp, homo sapiens
taagtgtaattgttttggagtaccacaagccacatccatataagagcacgaacttaagtgcaattgttttggagtaccac

SEQ ID NO: 6278 - DNA, 100 bp, homo sapiens
agaataatcaaccagcacactgtcctatacggactgtgcacatggtgccatattgactgtaaatgccacaggaactcagaataatcaaccagcacactgt

SEQ ID NO: 6279 - DNA, 81 bp, homo sapiens
tattgtgcataaccttgaaggaccccttcaaggggtcaatataacacaaggttatattgtgtataaccttgaaggacccct

SEQ ID NO: 6280 - DNA, 87 bp, homo sapiens
tctggctagtgatacctgtgtctggccagtgatacctgtgcctggctagtggatacccgcatctggctagtgatacctatgtctggc

SEQ ID NO: 6281 - DNA, 85 bp, homo sapiens
aatctcatgtatctatttgcctgctcctttaggcagtttctgcaatttgaataatctcaatctcatgtatctatttgcctgctcc

SEQ ID NO: 6282 - DNA, 103 bp, homo sapiens
agggggagccatggcagagctcagacacaggtggtgaccctggaaaaataagcagagcaaaagccagggaaaaccggcgaaggggggccatggcagagctcag

SEQ ID NO: 6283 - DNA, 94 bp, homo sapiens
acttgatttttcagaaagcctgatttcagacgtaatcgttcatgtttaagaagcagggatgctgacttgattttccagaaagcctgatttcaga

SEQ ID NO: 6284 - DNA, 100 bp, homo sapiens
gcctggtgtgtgggaggtactcatcagccacgtgtactgagcacatgtgtcccacctgcatgaggatgtgcacgtgcctggtgtgtgggagctactcatc

SEQ ID NO: 6285 - DNA, 89 bp, homo sapiens
attttttgcttcttcatctgtttagccaccgagactatgcgttctgatgtcttgatttacatattttttacttcttcatctgtttagcc

SEQ ID NO: 6286 - DNA, 140 bp, homo sapiens
gggcccaggcacccacgtgaggttggggaccatgaggctctgttgcccctttcccactggcgatggggctacttcgaggcattgggatgatgggaagagggcccaggcacccacgtgagggtggggaccatgaggctctg

SEQ ID NO: 6287 - DNA, 102 bp, homo sapiens
ggtgatggtatgaatgtaagacaggcatggatgaggctgggccccaggtggcatctcccaggcctgggcggtgatggcatgaatgtaagacaggcatggatg

SEQ ID NO: 6288 - DNA, 112 bp, homo sapiens
ttgtgcaccggtgctcgggggtgactggtctatatctgttttgcaagcgcagacatcctcagaccctatgaacaaagctgaataattgtgcaccggtgctcagggggtgact

SEQ ID NO: 6289 - DNA, 95 bp, homo sapiens
atgcctgcccctccaacacccactgcctaaccccaaaactgtcttagggctctgccccccatgcctgcccctccaacacccgctgcctaacccca

SEQ ID NO: 6290 - DNA, 90 bp, homo sapiens
caggcaagcaccttttgagtctgtttgttgcctgcccgcacgcccacccatctcaaaacgcaggcgagcaccttttgagtctgtttgttg

SEQ ID NO: 6291 - DNA, 133 bp, homo sapiens
ggactgcagcagcaaataactactaataaaaaggcagtggtagaatgttgacgtagccaataaaaggcagcagcagaatgttgatgtaaccagtggggactgcagcggcaaataactactaataaaaaggcag

SEQ ID NO: 6292 - DNA, 88 bp, homo sapiens
agttacaaagttatttacttggtgtacacactatgcaaataaaaagggtgtttcctgtctgaagtagttacaaagttatttacttggt

SEQ ID NO: 6293 - DNA, 101 bp, homo sapiens
atgtgcaggtgcccccgcctgggccggcgtcccctgggggtgggggtgcagggagcactgggacaatcactacaggatgtgcaggtgcccccacctgggcc

SEQ ID NO: 6294 - DNA, 97 bp, homo sapiens
tccttcacccttagcagcaagtcccgcttttcttggggagaagcaagaacccctcaaccccttctccttcacccttagcagcaagtcccacttttct

SEQ ID NO: 6295 - DNA, 108 bp, homo sapiens
ttagctagacacagagtgctgattggtgcatttacaatcctttagctggacacaaaagttcttcaagtcccccaccagattagctagacacaaagtgctgattggtgc

SEQ ID NO: 6296 - DNA, 89 bp, homo sapiens
ttttgtgagatatcattctcatgttttttttaaaaaaaattgtctcttattgatattctctatttttgtgagatatcattctcatgttt

SEQ ID NO: 6297 - DNA, 126 bp, homo sapiens
cgatgcggggagtaagagccagcccctcttgcccccctggctcttaagacccccatcgcaggggggcgaggagccccccacgatgcggggagtaagagccagcccctcttgccccccctggctctt

SEQ ID NO: 6298 - DNA, 75 bp, homo sapiens
tttagtacaaatgtattttagtacaaaatacaatagtatttagtattttgtatttagtacaaatgtatttttgta

SEQ ID NO: 6299 - DNA, 125 bp, homo sapiens
gctgtatggagtctgcaggtaaacatgcctgtgtgtcaaagaatgagtctgtatgggtgtgtactgtacagggtatatgctgtatggagtctgcaggtaaacatgcctgtgtgtcaaagaatgag

SEQ ID NO: 6300 - DNA, 113 bp, homo sapiens
ccactgtactccagcctgagcaacagagtgagactctctctcaaaaaataaataaaataaaaagaaggtagtgagcaggccactgtactccagcctgggcaacagagtgagac

SEQ ID NO: 6301 - DNA, 90 bp, homo sapiens
caatagagaataatttcttctgtgtatacgaggcacacagcacaacacctggcatggagtacgtgcccaatagagaataatttcttctgt

SEQ ID NO: 6302 - DNA, 110 bp, homo sapiens
ttgtccccaagctctgaccactcacaaataaaagagccttaatctcccacccaatgttttccaccttccctatcactcagtctcttgtccccaagctctgaccacccaca

SEQ ID NO: 6303 - DNA, 97 bp, homo sapiens
ctttgtaacttcagcctctgattggttgcttttcacaaccaatcagacacttgcataagtgtaacctttgtaacttcagcctctgactggttgcttt

SEQ ID NO: 6304 - DNA, 141 bp, homo sapiens
ggaaagaatgggctctggtcctgcaacccaacctcctatcccagcacagttccaagctgctggtgttctggaccagggccaaagggtttgggttggaaagaataggctctggtcctgcaacccaacctcctatcccagcac

SEQ ID NO: 6305 - DNA, 100 bp, homo sapiens
atcagcttaaggagattttgggctgagactatggggtgattttgtatcctgagactttgcagaagttgctgatcagcttaaggagactttgggctgagac

SEQ ID NO: 6306 - DNA, 100 bp, homo sapiens
tttttggtggctgaatagtactccattgtacatgttccatccatgttgttgcaaatgacaggatctcattcttttttgtggctgaatagtactccattgt

SEQ ID NO: 6307 - DNA, 114 bp, homo sapiens
aaagccaaaatatctaaccaagaaaataactgcttctacttctagttttaaaagccaaaattatatatatacataaaataaaaaatgaaagccaaaatatctaaccaagaaaat

SEQ ID NO: 6308 - DNA, 83 bp, homo sapiens
gtatgtaatactaaagtattacatacttttcagtagcatccccctaacctagaggtcagtatgtatactaaagtattacatac

SEQ ID NO: 6309 - DNA, 117 bp, homo sapiens
cacaatatcacacagctattacaaattatatttataaaacacatacaagaaaaatacttatgttagcaaaaaaggagcaaaattatatcacaatatcacacagccattacaaattat

SEQ ID NO: 6310 - DNA, 103 bp, homo sapiens
ctctgtcacccaggctggagtgcagtggatgccacacccagctcttttatttatttatttttttgagacagggtctcactctgtcacccaggctggagttcag

SEQ ID NO: 6311 - DNA, 97 bp, homo sapiens
accaccatgctggctactttttttgtaattttagtagacatgaggtctctactaaagaccagaggcatacaccaccatgctggctatttttttgtag

SEQ ID NO: 6312 - DNA, 89 bp, homo sapiens
tttacttttagatgtttaccttcagtaaacagtaaagtaccaccttaagtaaagtggtaccacattttacttttagatgtttaccttaa

SEQ ID NO: 6313 - DNA, 157 bp, homo sapiens
tgggcactctgtatctagctcaaggtttgtaaacacaccaatcagcaccctgtgtctagctcagggtttgtgaatgcaccaatccacactctgtatctagctactctggtggggacttggaaaacctttgtgtccacactctgtatctagctaatct

SEQ ID NO: 6314 - DNA, 99 bp, homo sapiens
tatcaaatttattttataatatgaattatcaaatatgaatatttgctaaaatatcaaatatgaatatttgctaaaatatcaaatgtattttataatatg

SEQ ID NO: 6315 - DNA, 84 bp, homo sapiens
aaatatttttatgaggaccattgaggggccagtaggccctatatcggtacattgaatgaaatatttttatgaggactattgagg

SEQ ID NO: 6316 - DNA, 72 bp, homo sapiens
ttaattttactttaagttctgggatacatgtgctttcagttctttaactttaattttactttaagttctggg

SEQ ID NO: 6317 - DNA, 143 bp, homo sapiens
gcaagaaccccccaactccttctctccatgtctctaccccttctccgcctttctgggaggcaagaaccccccaaccccttctccttcacccttagcagcaagtactgcttttctagggggcaagaaccccccgatccctaatt

SEQ ID NO: 6318 - DNA, 76 bp, homo sapiens
cacaaaagaagtgaaaatggcctgttcctgccttaactgatgacattccaccacaaaagaagtgaaaatggccagt

SEQ ID NO: 6319 - DNA, 76 bp, homo sapiens; identical to SEQ ID NO: 6318

SEQ ID NO: 6320 - DNA, 96 bp, homo sapiens
ctgatatgcataaaagtaccttacattagcagaggggagagagagaaacacatcaaaattttctgatatgcataaaagtaccttacattagcagag

SEQ ID NO: 6321 - DNA, 113 bp, homo sapiens
aatgtcatctgcagacctcttatttcagaagcactttgttaaattgtaataaaataagcattaaaataagaatgcctcacagaatgtcatctgcagacctcctatttcagaag

SEQ ID NO: 6322 - DNA, 93 bp, homo sapiens
attttagaaaaaagcagatgaaatggagaaaagttttacattttagaaaaatgttattttacattttagaaaaaagcagatgaaatggagaaa

SEQ ID NO: 6323 - DNA, 99 bp, homo sapiens
tcaactatcatagagtgatacttcattgttatctgttggagctcagaaaacaataccccaaagtattgatactatgtcaactatcatagagtgatactt

SEQ ID NO: 6324 - DNA, 78 bp, homo sapiens
tatatacataattataattctgtataattcttatatacaggattataattataattatatacatgattataattctgt

SEQ ID NO: 6325 - DNA, 93 bp, homo sapiens
aaatggaatgcttttacactgttggtgggagtgtaaatgagtttaaccattgtggaagacagtgtggaaatggaatgcttttacattgttggt

SEQ ID NO: 6326 - DNA, 105 bp, homo sapiens
agtgggtagctcctttctgcaggcaggttgtcctgagaagtatccagctgtcaatgaagagggatctgcagtgggtggctcctttctgcaggcaggttgtcctga

SEQ ID NO: 6327 - DNA, 89 bp, homo sapiens
gtgtctagctaaaggattgtaaatgcaccaatcagcactctgtaaaatagcaccaatcagcactctgtgtctagctaaatgattgtaaa

SEQ ID NO: 6328 - DNA, 105 bp, homo sapiens
tgttaatttcccattaataccaatattggtaatattggtattattggtattaacaggaaattaaccaatgtcccaatatgttaatttcccattaataccaatatt

SEQ ID NO: 6329 - DNA, 83 bp, homo sapiens
acagattcttacagcactttttggaacactgaataccaaacagttatcattcctctaacagattcttatagcactttttggaa

SEQ ID NO: 6330 - DNA, 96 bp, homo sapiens
tgggacacagctaaagcagtattaagaggggagtttacagaacaaagagacaatgtaccacaatctgtgggacacagctaaagcagtgttaagagg

SEQ ID NO: 6331 - DNA, 80 bp, homo sapiens
aaggagtcttgagggtaccagttccagcatttttttttttttaagtaaattacaaggagtcttgagagtaccagttccag

SEQ ID NO: 6332 - DNA, 74 bp, homo sapiens
cagccattttcacttcttttgtggtggaatgtcatcagttaaggcaggaacaggccattttcacttcttttgtg

SEQ ID NO: 6333 - DNA, 120 bp, homo sapiens
gaaaggattccttatttaataaatggtgctgggatcttcaacaaagttgaggtgctgatcctcaacaaagttgacaagcaatgtggaaaggactccttatttaataaatggtgctgggat

SEQ ID NO: 6334 - DNA, 95 bp, homo sapiens
ttaaaaatccaggttttatagttgtcagtccccatatgagcaaaaaataataaaattaaattaaattaaaattaaaatccaggttttatagttgt

SEQ ID NO: 6335 - DNA, 88 bp, homo sapiens
cccccgaccccttctctccgtgtctctaccccttctccactttcctggggggcaagcaccccccaaccccttctctccgtgtctctac

SEQ ID NO: 6336 - DNA, 84 bp, homo sapiens
aaggtgaatttcttgtaccatatagttttcatccctttactttcagtctaattcagcaaggtgaatttcttgtaccatatagtt

SEQ ID NO: 6337 - DNA, 88 bp, homo sapiens
tatagtatgtgtttggaggctatatagtatggtatacattttatatagccatactatatggctatatagtatgtgtttggaggtatag

SEQ ID NO: 6338 - DNA, 135 bp, homo sapiens
acagaataattttatatctcttaaatcagtggaagtttatttaaaacatctgcagaaactcgcacacacacacacacacacaaagacagaataattttatatctcttaaatcagtggaagtttatttaaaacatc

SEQ ID NO: 6339 - DNA, 102 bp, homo sapiens
ctatttttgatactatttagagactatttctgatactatttagagtaagacgggccttgtaatatgcatcatcatgatctatttctgatactatttagagta

SEQ ID NO: 6340 - DNA, 76 bp, homo sapiens
atatttattaaaattattgcttcttaatgtgttatgtttcccaatgtgttatgttatttattaaaattattgcttc

SEQ ID NO: 6341 - DNA, 84 bp, homo sapiens
ctcttaaactttttaaagatatatttttatagatataaaatactctcttacttttattatctcttaaacttttttaagatatat

SEQ ID NO: 6342 - DNA, 83 bp, homo sapiens
acccctccagtagagggtgcacttgcaagcggcatttgtagcattcggtgaggtttctttacccctccggtagagggtgcact

SEQ ID NO: 6343 - DNA, 96 bp, homo sapiens
gaaataatccaggcacagaaaaacaagcattttattattttaggtgaaagacaaacattttattttaggtgaaataatccaggcacagaaagacaa

SEQ ID NO: 6344 - DNA, 94 bp, homo sapiens
attttatgtcatataacaatttttattgtttgttaaatgactttattgtttgtcatatgataattttatgtcatagaacaatttttattgtttg

SEQ ID NO: 6345 - DNA, 87 bp, homo sapiens
atttgttcttatttaaacaatacatttctgagcaaacagtcgccatactttatacttaaattatctgttcttatttaaacaatacat

SEQ ID NO: 6346 - DNA, 94 bp, homo sapiens
tgtcatcttgaatacaagtgggcatataataatgcttaatacatatttgttgaatttcattaaagatgttttgtcatcttgaatacaagtgggc

SEQ ID NO: 6347 - DNA, 142 bp, homo sapiens
attaagcagataaatatattcaataagttaccaatctctctggccaattgattacttctcataacggtgttttgttcttttctcaaacttggtttaaatattaagcagataaatatattcaataagttaccaatatctctgg

SEQ ID NO: 6348 - DNA, 80 bp, homo sapiens
tcattggacacagacatatacctagggtagaattccagtcccattcatacttctcttcattggacacagacatataccta

SEQ ID NO: 6349 - DNA, 115 bp, homo sapiens
atggaaattatatatatatatatatatatatatatatatatatatatatatatatatatatatattcttgctgatgtttggatcaggtttgctttatgtcttagtatatatatat

SEQ ID NO: 6350 - DNA, 73 bp, homo sapiens
aaaactttcacaataaaatggggcaaaaatctttctattttgaaagtattaaaacttttacaataaaatgggg

SEQ ID NO: 6351 - DNA, 111 bp, homo sapiens
aagttcacccagagaaacagaaccagcaatacacacacacacacacacacacacacacacacttcaacccaagttcacccagagaaacagaaccagcaatacacaaacaca

SEQ ID NO: 6352 - DNA, 89 bp, homo sapiens
gtaaaaggaaattagatatccaaaatgagagtaaatatttaaatgttttagaattttaaataaaagtaaaaggaaattagatatctaaa

SEQ ID NO: 6353 - DNA, 80 bp, homo sapiens
tatgccctatgtaaatgaagatgacgaagtaaagttacaaagtcatttactcggtgtatgccctatgtaaatgaagagga

SEQ ID NO: 6354 - DNA, 102 bp, homo sapiens
tttcaggccatatttcatagggctctatattagagaacttccaaatagttatttgaaaattcaaatatgatttcaggccatatttcatagggctctattatt

SEQ ID NO: 6355 - DNA, 84 bp, homo sapiens
tccttctgctgctggaggaacttccaaatatgataccatgtgggcaccccctgtttccttctgctgctggagaaacttccaaat

SEQ ID NO: 6356 - DNA, 97 bp, homo sapiens
aatataggaggaatttactagacaccagttattcattatttcattcaattaaaatgtcttctgcacccaaaatataggaggaatttactagacacca

SEQ ID NO: 6357 - DNA, 75 bp, homo sapiens
gttcctgccttaactgatgacattccaccacaaaaaaagtgaaaatggcctgttcctgccttaactgatgacatt

SEQ ID NO: 6358 - DNA, 97 bp, homo sapiens
accatggaatactatgcagccataaaaagaatgaaatcaactggataaaaaaaatgtggtacatatacaccatggaatactatgcagccataaaaag

SEQ ID NO: 6359 - DNA, 87 bp, homo sapiens
agatattttgatacaggcatggaatggtacatagtaggtatatatatttatgggtaacatgagatattttgatacaggcatgcaatg

SEQ ID NO: 6360 - DNA, 97 bp, homo sapiens
tctccttgtctctaccccttctctgcttttctggggaaggggcaagtaccccaaccccttctctccttgtctctaccccttctctgctttcctgggg

SEQ ID NO: 6361 - DNA, 110 bp, homo sapiens
gaacagagggagcaagaactagagagagagagagacagacagagagagagagagagagagagtgtgtgtgtgtgtgtgtgtgtgtgtgagagagagagagagagagagag

SEQ ID NO: 6362 - DNA, 117 bp, homo sapiens
ttttcaaggattctgcatggaaagtagccctgaaatacacagaatgtaccttctttgaggcactgacttcttttgctttgaaatatctttttcaaggattctgcatagaaagtagcc

SEQ ID NO: 6363 - DNA, 109 bp, homo sapiens
caactattctgatcagcagggtccagggaccattgcgggttcttgggcagtagttgtttctgctgctgtgttggtgggtgcaactattctgatcagcagggtccaggga

SEQ ID NO: 6364 - DNA, 108 bp, homo sapiens
caccaatcggcactctgtatctagctcaaggtttgtaaacacaccaatcagcaccctgtgtttagctcaaggtttgtgaatgcaccaattgacactctgtatctagct

SEQ ID NO: 6365 - DNA, 111 bp, homo sapiens
gtgtatgcctatataacaaacctgcacattctgcacatgaaggttgatgggtgcagcaaaccaccattgcatgtgtatgcctatataacaaacctgcacattctgcacatg

SEQ ID NO: 6366 - DNA, 115 bp, homo sapiens
aaagtgctaggattacaggcgtgagccaccatgcctggctggtcttgaactcttaacctcgtgatccacctgcctcggcctcccaaagtgctgggattacaggcgtgagccacca

SEQ ID NO: 6367 - DNA, 129 bp, homo sapiens
ctgttttgattttatattttggtgtatttaaaagccgtttttgtttgattttatattttgttaattttgtttgattaaatttgtttgattaaaatcaaacacaaaatttgtttgattttatattttgct

SEQ ID NO: 6368 - DNA, 125 bp, homo sapiens
agcaacaactccttcaaacaaaaacatggaaattatattctgtagccagagcatgaaatgttctgtaaacacacattccttctattatacatagcaacaactccttcaaacaaaaacatggaaat

SEQ ID NO: 6369 - DNA, 113 bp, homo sapiens
gggctggagggtcaagagggagggcatggtcactttactcaatccacatgtgaggacttgagtatttaaagcagaaacaggggctggagggtcaagagggagggtatggtcac

SEQ ID NO: 6370 - DNA, 85 bp, homo sapiens
acaggcaaggcagggatatgttataagagttaaatgtaaggttcctcttaaatattaaccacaggcaaggcagggatatgttata

SEQ ID NO: 6371 - DNA, 112 bp, homo sapiens
tttctttacatgatttctagttttacaggggctttaaaaaagaataggaaataggaataggaaatcactttaagtcatcttctttctttgcatgatttctagttttacaggg

SEQ ID NO: 6372 - DNA, 74 bp, homo sapiens
tttaatctctatatggcagcatatacatatatatatataaaatgcacacttttaatctctatatggcagcattt

SEQ ID NO: 6373 - DNA, 111 bp, homo sapiens
tccccatcagaaaatagagataaatatctaacagtttttagccacagacctaaccaggtctcacacctgcaagcctcggtttccccgtcagaaaatagagataaatatcta

SEQ ID NO: 6374 - DNA, 87 bp, homo sapiens
cccctaaatagttatttaatctgatctctcttcccacctctgtttattccttctgattttaccccctaaatggttatttaatctgat

SEQ ID NO: 6375 - DNA, 314 bp, homo sapiens
acagagagtcgattggtctgttttacagagagccaattggtccattttgacagggtgctgattggtgcatttacaatccctgagctagacacaaaagttctccaaatccccactagattagctagacacagagcactgattggtgcatttacaaaccttgagctagacacagggtgctgattggtgtgtttacaaaccttgagctagacacagagtgctgactgatgtatttacaatcctttagctagacataaaggttcttcaagtccccactagattagctagatacagagtgctgattggtgcatttacaa

SEQ ID NO: 6376 - DNA, 78 bp, homo sapiens
aggaatgttatatggtaaattattgtcctaaaatagggaagaatttatatgaaaaggaatgttatatggtaaattatt

SEQ ID NO: 6377 - DNA, 118 bp, homo sapiens
atctgaacagctaatgctagcaaccaccaaactcagtgacctttagagttaaaggatatgactgaagataatgaataggtctgcttattatctgaaaagctaatgctagcaaccacca

SEQ ID NO: 6378 - DNA, 93 bp, homo sapiens
tcctagagacttgttaaattgttttggagggctcagaagaagacacgaagatgaggaaagatttggaacctcctagagacttgttaaattgtt

SEQ ID NO: 6379 - DNA, 154 bp, homo sapiens
taaataaataaataaataaaatgaggacattccaaaaagacacaggagccaggttgccctggcctgggcaacaagagcaaagctccgtctcaaaatacataagtaaataaataaataaataaaatggggacattccaaaaagacacaggagcca

SEQ ID NO: 6380 - DNA, 98 bp, homo sapiens
aggattgggcctggttagtacttgatgtttatggccataccatcctcgatgtacctgatattgaaagctaagtaaggttgggcctggttagtacttga

SEQ ID NO: 6381 - DNA, 106 bp, homo sapiens
gatcacttgagggcaggagattgagaccggcctggccaacatggtgaaaccccgtctctttgagaggtgaggcagatggatcacttgaggtcaggagattgagacc

SEQ ID NO: 6382 - DNA, 96 bp, homo sapiens
gccatgtgcagatgagaataatgtatattctgttgttgttgggtggagtgttctatatcttagattacatgccatgtgcagatgagaagaatgtat

SEQ ID NO: 6383 - DNA, 145 bp, homo sapiens
attcaccttatctctttctgggaatcctaatgaatttgccattagtgcatcctcccaattttctgaacaaaaactgttcagaggtaggaagcattgaaatattcatcttatctctttctgggaatcctaatgaatttgccattag

SEQ ID NO: 6384 - DNA, 91 bp, homo sapiens
gagtgaattggctgagtcaattatatattttttatatagaaatttacattttttattagaaattaagagtgaattggctgagtcaatttta

SEQ ID NO: 6385 - DNA, 76 bp, homo sapiens
gaatgtcatcagttaaggcaggaacaggccattttcacttcttttgtggtggaatgtcatcagttaaggcaggaac

SEQ ID NO: 6386 - DNA, 93 bp, homo sapiens
atcacttgagcccaggagtttgagaccaacctgggcaacatagtgagacaagctggagcatcacttgagcccaggagtttgagaccagcctgg

SEQ ID NO: 6387 - DNA, 120 bp, homo sapiens
cagatacctttccaatatactgatttcctttcttttgggtatatacccagcagtgagattgctggtaataaacacaggagtgcagatacctttccaatatactgatttccttttttttgg

SEQ ID NO: 6388 - DNA, 112 bp, homo sapiens
tagcaagacaggccaacattcaaattcaagaaatgtagagaaccttagtaagatacttaacaagaagatcaaccccaagatgcatagcaaggcaggccaacattcaaattca

SEQ ID NO: 6389 - DNA, 80 bp, homo sapiens
caagtctctagaaagttccaaactttttcacatctttctgtcttctgagccctccaagtctctaggaagttccaaacttt

SEQ ID NO: 6390 - DNA, 94 bp, homo sapiens
aaaatctgtatcaaatacagattatacaaaataatacaaatacaaattagacaaaatacagacctgatacaaaatctgtatcaaatacacatta

SEQ ID NO: 6391 - DNA, 93 bp, homo sapiens
cctttaaaaatgggcccatgtttttaaataaaacacactcattttctagtataccatgaacacctttaaaaatgggccaatgtttttaaataa

SEQ ID NO: 6392 - DNA, 91 bp, homo sapiens
gttttataactactgcttcaaattcaaatagaaatagtcatctttcaattaaaaaaatggtgcatgaggttttataactactgcttcaaga

SEQ ID NO: 6393 - DNA, 136 bp, homo sapiens
tttatctctgtaatgccactatttatttaattgtttctaccgcaactatttatttgtttctaccacaacttggcatacaagtatcactgcttttatctctgtaatgccactatttatttaattgtttctactgcaa

SEQ ID NO: 6394 - DNA, 149 bp, homo sapiens
tgcttttctcattgtggtttcccagaacctggaacaaaaaactctttctaaaacactgtgaaatacctttaaggaatcatttatttcccactttcagcctattgcttttctcattgtggtttcccagaacctggaacaaaaaacctttt

SEQ ID NO: 6395 - DNA, 125 bp, homo sapiens
gaacataaattgtgaagatttcatggacacttattagttccccaaattaatacttttataatttcttatgcctgtctttactgcaatctctgaacataaattgtggagatttcatggacacttat

SEQ ID NO: 6396 - DNA, 101 bp, homo sapiens
gcttcaaaattttccagatatttcattaagtcatatggaatctcaattaattgcacatattctgataaatgaaatagcttcaaaaatttccagatatttca

SEQ ID NO: 6397 - DNA, 125 bp, homo sapiens
gaacataaattgtgaagatttcatggacatttattagttccccaaattgatacttttataatttcttacacctgtctttactgcaatctctgaacataaattgtgaagatttcacggacatttat

SEQ ID NO: 6398 - DNA, 89 bp, homo sapiens
cacatggctgaggaggcctcaatacaagtaatttataaaggaaaattccacatggactcacagttccacgtggctgaggaggcctcaat

SEQ ID NO: 6399 - DNA, 114 bp, homo sapiens
gtgatctcatctcactgcaacctccacctcccaggttcaagtgtctgtcacccaggctggagtgcagtggtgtgatctcatctcactgcaacctccacctcccaagttcaagtg

SEQ ID NO: 6400 - DNA, 92 bp, homo sapiens
tttggctttgataatagttgatatgcctatgccttatggatcattttagctttggcactgatttttctatttggctttgataatagttgata

SEQ ID NO: 6401 - DNA, 141 bp, homo sapiens
aagttcagcactatagcatcatgtcagaagagtaattctataattaaaacaaataatgtgctcagtaagtagatctgtctataaataaatttgtgtattaaagttcagcactatagcatcatgccagaagagtaattctat

SEQ ID NO: 6402 - DNA, 114 bp, homo sapiens
aatttgaacttgatttttcattttacataatgcagcatggataccttagatgctactaaccatggacatttcaaggacaacttaatttgaacttgattcttcattttacataat

SEQ ID NO: 6403 - DNA, 93 bp, homo sapiens
aactaataataaaaagaaacataaaaagtttgccaacctctaatgactttaaactagactaatcatttttaactaataataaaaagaaacata

SEQ ID NO: 6404 - DNA, 100 bp, homo sapiens
tagacagaaaagttctccaagtccccacccgattagctagacacagagcgctgattggtgcgtttacaatcctttagacagaaaagttctccaagtcccc

SEQ ID NO: 6405 - DNA, 127 bp, homo sapiens
cccaggctggagtgcagtggcacgatctcagctcactgcaatctccgcctctactttttttttttttcttttgaggagtcttgctctgccccccaggctggagtgcagtggcacaatctcagctcac

SEQ ID NO: 6406 - DNA, 129 bp, homo sapiens
tcttctgggtctagccaaccagtggggctgccacactcaaagcttttgctgtggaaattcctgagagccagactagtgattattactgttcttctgggactagccaaccagtggggctgccacactcaa

SEQ ID NO: 6407 - DNA, 94 bp, homo sapiens
tgtctagctagaggattgtaaatgcacccatcagcactgtgtaaaaacgcaccaatcagcactctgtgtctagctaaaggattgtaaatgcacc

SEQ ID NO: 6408 - DNA, 125 bp, homo sapiens
ataaatgcccatgaaatcttcacaatttatgttcagagactgcagtaaagacaggcataagaaattataaaagtattaatttggggagctaataaatgtccatgaaatcttcacaatttatgttc

SEQ ID NO: 6409 - DNA, 99 bp, homo sapiens
gagataacacaaacaaatgaaaaagcgtcccatttgtttacgacaagaattacaaaacactgctgaaaaaaactggagataatacaaacaaatgaaaaa

SEQ ID NO: 6410 - DNA, 190 bp, homo sapiens
caggtgggagccctgccctcccgggtggaggtgcagccatctgagttgtggttgcaggcctgagcttcctgctccacagagcaggtaggagccttgccctcccaggagctgcacctgtccaagtcatggctatagaccagacctccctgtgctcttgtgtggggacaggtaggagccctgccctcccagg

SEQ ID NO: 6411 - DNA, 99 bp, homo sapiens
tttttttcttgagatggagtatcactctgtcacctaggctggagtgcagcagtgaaggaagttgtatcttttttttttttcttgagatggagtctcact

SEQ ID NO: 6412 - DNA, 177 bp, homo sapiens
gtattttggtttgattaatcagtctacctattagtttataggtaatatacggtattttggtttgattaatcagacataaattaggatcttatgaatacattattttagtttattagtttaataaattatttagtttattagtttataggtaatgtattttggtttgattacagtcta

SEQ ID NO: 6413 - DNA, 98 bp, homo sapiens
aagagatttccacattttttgaaaattatctatcagtgtagctacctttttctttaaacaattatcttttcaagagatttccatattttttgaaaatt

SEQ ID NO: 6414 - DNA, 168 bp, homo sapiens
ggagaggagctacccactccagggtctcctccctgctgaatggtgagcagatgatgggaaaaccagccaaggagaagagctacccactccagggtcttcactctgctgagagctgaacactcatcgggacaccctggctgtggagatgagctacccactgcacgtctc

SEQ ID NO: 6415 - DNA, 128 bp, homo sapiens
caaagtgctgggattacaggcatgagccactgcacctggcctggtcagatttttttccactggactttacaaatgtacagaggaacagataatcaaagtgctgggattacaggcatgagctactgcac

SEQ ID NO: 6416 - DNA, 121 bp, homo sapiens
aaatgaaatatccagaagaagcaaatccacagagacagaaatatgaaaatccacagagacagaaatgtgaaatattgaaaaaatgaaatatccagaagaagcgaatccacagagacagaaa

SEQ ID NO: 6417 - DNA, 92 bp, homo sapiens
caaacttacagcttgcattccagctacccccagtcacctggaagagatggttcagagagctccaaactcacagcttgcattccagctacccc

SEQ ID NO: 6418 - DNA, 104 bp, homo sapiens
actctgaactaagggtggagaagaggactccatgggggtacatgctctgcagtctgcacttagcactgcactctgaactaagagtggagaagaggactccatgg

SEQ ID NO: 6419 - DNA, 135 bp, homo sapiens
tgcctttcggctattgtgaatgatgctgctgtgaacatgggtagcccaggtatctgtatctgtttggtctgccatctgtatctgtcatttgggtctgcctttcggctattgtgaatgatactgctgtgaacatgg

SEQ ID NO: 6420 - DNA, 95 bp, homo sapiens
cccaaagcatcggggtgacttttgcactgatgaggtcaaattgatggtcatagaatcagaaagcaaaaacccaaagcattggggtgacttttgca

SEQ ID NO: 6421 - DNA, 111 bp, homo sapiens
tagttacaataaataactgatgagaaaaagagtgtttgataaataattgtatttagttaatacaatttgataaatattatagttacaataaataactgatgagaaaaagag

SEQ ID NO: 6422 - DNA, 92 bp, homo sapiens
tgattggtgtgtttgcaaacctttagttacacacagagcgctgattggtgtgtttttacagagtgctgattggtgtgtttacaaacctttag

SEQ ID NO: 6423 - DNA, 151 bp, homo sapiens
ctctgcagttgattttgcctatgttggcatctgtttgtagctttcaccagtgagatgcgccctgtttgcagtcctaggcaggctctttccacagcctgaagctctgcgttgattttgcctatgttggcatctgtttgtagctttcaccagt

SEQ ID NO: 6424 - DNA, 184 bp, homo sapiens
gatagagtgacagattagatagatagatagatagatagatagatagatagatagatagatagataaatatatagatgatagagcgacagattagatagatgcagtgacagattagatagacgacagagtgacagattagatagatacagtgacagatgtagatagatagatagatgatagatag

SEQ ID NO: 6425 - DNA, 93 bp, homo sapiens
tattcccctctccaggtcattatctggacaagagttttatgactcttagcattgtcttctcaccctttattcccttctccaggtcattatctg

SEQ ID NO: 6426 - DNA, 133 bp, homo sapiens
tcaaatatatatatcattttatatataatcaaatatatatatcattttatatatacatctcaaatatatatatcattttatatatacatctcaaatatatatatcattttatatatacatctcaaatatatat

SEQ ID NO: 6427 - DNA, 152 bp, homo sapiens
atgaggcagggaaagccccattactagaagggtttaaacagggactgtagaaccattggccaggattatgagagtagcatatgcctactcatacatagttcagaaatgaggcagggaaagccccgttactagaagggtttaaacagggactg

SEQ ID NO: 6428 - DNA, 79 bp, homo sapiens
atttcacaaggaaagggcatggaagggtgaatatattaatgtgctagaaaggctatttcacaaggaaagggcatggaag

SEQ ID NO: 6429 - DNA, 161 bp, homo sapiens
gacctgcctgcagagaggagctaccctctccactgagagcttcagagatctgtagaaatgtctgaaggacctgtctgcagagaggagctatcgtctctagggcctcctctctgcagacagccgaacactccactggatgacctcactatagagaggagcta

SEQ ID NO: 6430 - DNA, 96 bp, homo sapiens
taatcccagcactttgggaggccgaggcgggtgatattggccaggcatggtggctcatgcctataatcccagcactttgggaggccgaggtgggtg

SEQ ID NO: 6431 - DNA, 128 bp, homo sapiens
tctgtcccccaggctggagtgcagtggcgtgatcttgggcaagcttttgtgttctgtgtcatttttttttttttttttgagatggagtctcactctgtcgcccaggctggagtgcagtggcgtgatct

SEQ ID NO: 6432 - DNA, 136 bp, homo sapiens
gcaggactgtggcccgagccttggggtgggctggcagtggcacacgtagagagagctgccatgggcaacacgggaaaatggggagacccgcaggactgtggcccgagccttggggtggggtggcagtggcacacgt

SEQ ID NO: 6433 - DNA, 92 bp, homo sapiens
tttatttcaatttatatatgtcatagtatgtctagaagtgaatatcagggacactaaagcttttatatcaatttatatatgtcatagtatgt

SEQ ID NO: 6434 - DNA, 122 bp, homo sapiens
ttaggtaagacttactgatccagagacagacacacacacacacacccctcttctaagactttatgccaaagtcttgcttaaaatgaagacttaggtaagacttactgatccagagacagaca

SEQ ID NO: 6435 - DNA, 158 bp, homo sapiens
agttagatacagagtatggacaggaaggttctcaaaggccccaccagagcagctagatacagagtgtcgattggtgcactcacaaaccctgagctaaacacagggtgctgattggtgtgtttacaaaccttgagctagatacagagtgccgattggtg

SEQ ID NO: 6436 - DNA, 91 bp, homo sapiens
ggccagaggagtgtgatggagaaggtggggaagagatactgataagtttgcatctccaggtgggccagaggagtgtggtggagaaggtggg

SEQ ID NO: 6437 - DNA, 107 bp, homo sapiens
tttgcataggggtataactttgtaacttcacttcaggctttcattggtcccctcccacaaccaattggatgtttgcataggggtataactttgtaacttcagttcag

SEQ ID NO: 6438 - DNA, 339 bp, homo sapiens
tatcccccctctacctaagcccagcccctccccagcagccccccaccatcctcctctctacctaacccccagcccctgccaaccagccccccactatcctcccctctacctaacccccccagcccctctccccagcccccaccatcctcttctctacctaaccccccagcccctctcctcttaggcccccatctagccccccgcctaaccccctctctacttaacctccacccctcctagtcccctcctaatccagcccccgctcctttagccccctccttacctagcctcctccccatcaactccctgtccacctagccccctccccacccactcccc

SEQ ID NO: 6439 - DNA, 102 bp, homo sapiens
ggttagggagttagagaccagcccggtgggtgggtgggtgggtgggtgtgggtgtgtgggtgtgtgtcccagattacggtttgggagttagagaccagcccg

SEQ ID NO: 6440 - DNA, 72 bp, homo sapiens
aagaaaattgacaccccaaagattgccaccggctacagaggcttccagaaagaaaattgacacctcaaagat

SEQ ID NO: 6441 - DNA, 104 bp, homo sapiens
atcccagtgccctgacatattattcatatttacatatttacatatgaataaatatgcatatttattattgtatcccagtgccctgacatgttattcatatttac

SEQ ID NO: 6442 - DNA, 82 bp, homo sapiens
tgtggatcaggaaaaataactaaaaaaaggggaacaaaacacacaggggcctattggagtgtggatcaggaaaaataactaa

SEQ ID NO: 6443 - DNA, 95 bp, homo sapiens
aaaacaaacgaacaaaaacccacaagtaatcacaatatagggagtaagtgggctgttagaaaaactaacaaacaaaaacccacaagcaatcacaa

SEQ ID NO: 6444 - DNA, 151 bp, homo sapiens
ccattgcactccagcttaggcaaaaagagtgaaactccatcttaaaaaaaataaaataagaaaaattagaggcaagcggaggttgcagttagcagagatcatgccattgcactccagcttaggcaaaaagagtgaaactccttcttaaaaa

SEQ ID NO: 6445 - DNA, 128 bp, homo sapiens
aagaattatggtagggcttgaactttggtaaagaataagtatagttaaacaacgacctatcgtgtctcaaaaaataaaaaataaataaataagaattatggtaggggcttgaactttggtaaagaata

SEQ ID NO: 6446 - DNA, 74 bp, homo sapiens
atggccggttcctgccttaactggtgatattccactacaaaagaagtgaaaatggcctgttcctgccttaactg

SEQ ID NO: 6447 - DNA, 124 bp, homo sapiens
taattgaaaaataaaagaatagaaaagggatactaagcaattcaagtgtagtttgtttattcgaggcacacctaatacagaagcagaagtagtaattgaaaaacaaaagaatagaaaagggata

SEQ ID NO: 6448 - DNA, 123 bp, homo sapiens
ttacctagaaccaaggccaacacattccactgaaccaacaccccaagactcatttataagaaactatacagagactacactattgggtttacctagaaccaaggtcaacacattccactgaac

SEQ ID NO: 6449 - DNA, 147 bp, homo sapiens
cattatttgaacccaagagaagcccatgacagtttcctcctcttatttccggcctgaactgttcatttaagatgagaaaacctgatttttttaaaccaccattatttgaacccaagagaagccatgacagtttcctcctcttatttc

SEQ ID NO: 6450 - DNA, 122 bp, homo sapiens
gaagaaatttctatccaaaagaactgcaattgtcttaagacctcctatcctaggaatctcattagataaccaggaaagattaaccaccagaagaaatttctatccaaaaggactgcaattgt

SEQ ID NO: 6451 - DNA, 91 bp, homo sapiens
aggccttgtttattaaataaacttgcttatttaataaataatatttaataggactattattaagtaataggacttgtttattaaataaact

SEQ ID NO: 6452 - DNA, 140 bp, homo sapiens
atggcattaaaaccatttagaaaatcaaatgatcaccatccctttcagattaatacttctcttttcatgattcaacacgcactcacacaattaaaggcgatggcattaaaaccacttagaaaatcaaatgatcaccatcc

SEQ ID NO: 6453 - DNA, 79 bp, homo sapiens
caagtctctaggaagttccaaacttcctcatatcttcctgtcttctgagccctccaagtctctaggaagttccaaactt

SEQ ID NO: 6454 - DNA, 75 bp, homo sapiens
aatgtcatcagttaaggcaggaacaggccatttacacttcttttgtggtggaatgtcatcagttaaggcaggaac

SEQ ID NO: 6455 - DNA, 93 bp, homo sapiens
tagaaaagcgggacttgccactaagggtggaggagaagggcttgagggattcttgcgtttcctctagaaaagcgggacttgccgctaagggtg

SEQ ID NO: 6456 - DNA, 88 bp, homo sapiens
ggtgcagcaaaccaccatggcgtgtgtaacgtaggtcacctaatgtaggtgacaggttggcaggtgcagcaaaccaccatggtgtgtg

SEQ ID NO: 6457 - DNA, 161 bp, homo sapiens
atgagcatgtgtgcgtgcttgtgtgtgaggtgtgtgtgcatctgtgcatgcatgtgcgtgtgtggtgcatgcatgggtgcgacagtgtgtgtgggtgcgcgtgcaggtgtacgtgtgcatctgtgcatgcatgtgcgtgtgtggtgcatgcgtgggtgcga

SEQ ID NO: 6458 - DNA, 152 bp, homo sapiens
acatataaaaccctttaataactgttttcctttcttaaaagatatgagaaaagctttatattaaataaaaaactgaaggggatacaccagtggcacacatacacacatataaaactctttaataactgttttcctttcttaaaagatatgag

SEQ ID NO: 6459 - DNA, 100 bp, homo sapiens
gtagcaggctgtggcaagtccttgtggcttaggatggcaacaagaatggttggaaatcacacatagtgctcccttgagtagcaggctgtggcaagtcctt

SEQ ID NO: 6460 - DNA, 81 bp, homo sapiens
tcacttaagcccagtagttttaggctgctgggagttttaggctgatgggaggatcacttaagcccagtagttttaggctgc

SEQ ID NO: 6461 - DNA, 129 bp, homo sapiens
tggaaatagagacatagtaagtggtgaacaggtggaaatagagacgtagtaagtggttaacttactgcgtcttttgggggttccaaaaagaacctcagatggaaatagagatgtagtaagtggttaact

SEQ ID NO: 6462 - DNA, 100 bp, homo sapiens
tgaaggttccttttggatttgatttccaattttatatgaaggttatgaagtttccttttggatttgaaggttccttttggatttgaaggttccttttaga

SEQ ID NO: 6463 - DNA, 142 bp, homo sapiens
ggggttcttgccccctagaaaagcggtacttgccgctaagggtgaaggagaaggggttggggggttcttgcctcccagaaaagtggagaaggagtagagacatggagagaaggagttgaggggttcttgcttcccagaaaag

SEQ ID NO: 6464 - DNA, 94 bp, homo sapiens
gcctagcacatgacacaggttggtctgatgaaaggtgaagcattgctagactgaagatactctggaaggcctagcacatgacacaagttggtct

SEQ ID NO: 6465 - DNA, 88 bp, homo sapiens
cctgcagcagtaacctaaggctctagagtctcttccctattgcctatgactgttcccgaggctcccgcagcagtaacctaaggctcta

SEQ ID NO: 6466 - DNA, 88 bp, homo sapiens
cctcactcggtttcctgtagaccatggcaaagagcatgcattgtattccaaacacaatcctcagtcggtttcctgtagaccatggcaa

SEQ ID NO: 6467 - DNA, 122 bp, homo sapiens
ttcgccaggtttctacctggagacagtttcccaaccacattgcaggaagtcagagtcaaagcaaggtgagccccacaattcgccgggtttctacctggagacagtttcccaaccacattgca

SEQ ID NO: 6468 - DNA, 91 bp, homo sapiens
gctcgctccatcccaccgccctgcagggggcgaagaactgaaacatccatgcgcacttcagcgctcgctccatcccaccgccctccagggg

SEQ ID NO: 6469 - DNA, 83 bp, homo sapiens
aaacaacccaactaaaacacccttagtgcccattagtttctccatataattttgaaacaacccaactaaaacaccccttagtg

SEQ ID NO: 6470 - DNA, 81 bp, homo sapiens
aaaaattaattgcaggaccatgtgcattcacctagccaatgggagagagagagaaaaattaattgcaggaccatgtgcatt

SEQ ID NO: 6471 - DNA, 137 bp, homo sapiens
actgagtgcattgctgtagtatatggcacagtttaccaagaactttcccgattcttggggcacgagccgggcctcagtgccagggcactgagtgcattgctgtagtatatggcacagtttaccaagaactttcccga

SEQ ID NO: 6472 - DNA, 137 bp, homo sapiens
gacttgcatggggcctatcgcccctttgtcttggccaatttctcccaatcattttggagctttaagacttgactgccttgttggatttcggacttgcatggggcctatagcccctttgtcttggccaatttctccca

SEQ ID NO: 6473 - DNA, 136 bp, homo sapiens
gggctctgccggggctggccagcctggccaaggggtcagagcctgcactccgttattgacagtgtctgccgcgcgggtgtgcggggacggggctctgctggggctggccagcctggccaaggggtcagagcctgca

SEQ ID NO: 6474 - DNA, 97 bp, homo sapiens
acactgagttaggaaccaggattcctagtctgaagggcagcttgtaggtgcggtagacataggaacactgagctaggaaccaggattcctagtctga

SEQ ID NO: 6475 - DNA, 104 bp, homo sapiens
ctccatccagtcctcctgctgcccgaggtggtcagtgcacgtagaatgtggctgggacctcggtcctccatccagtcctcctgctgcccgaggtggtcagtgca

SEQ ID NO: 6476 - DNA, 118 bp, homo sapiens
gtttacagatgacatgatcctttatattatttttttttaaaaaaagcatccagattgaaacagaagaaactctaccccatttgcagatgacatgatcctttatattattaaaaaaaaa

SEQ ID NO: 6477 - DNA, 252 bp, homo sapiens
ttggtgcatttacaatccctgagctagacacaaaagttctctaagtccccacagggcactgattggtgcatttacaaaccttgagctagatacagggtgctgattggtgtgtttacaaaccttgagctagatacagagtgctgattggtgtatttacaatcccttaggtagacataaaggttctccaagtccgcaccagattagctagatacagagtgctggttggtgtatttacaatcccttagctagaca

SEQ ID NO: 6478 - DNA, 93 bp, homo sapiens
tttttagcatttatgtttttcattgtttaggggaggagcggggaagcacgaggagctgtgaggttttttagcatttctgtttttcattgttta

SEQ ID NO: 6479 - DNA, 121 bp, homo sapiens
gataattccagagatcacagaaaactttctactagggaccttctaccgtacctactctttgagagagctaaaaaataatgtttatggataattccagagatcacagaaaactttctactag

SEQ ID NO: 6480 - DNA, 131 bp, homo sapiens
agacccagcggtttgccccattcctgggcctgcctggcagacgtgggtttggtgattggcatgggatgaggcaggggggtgggggacaccacagacccagcggtttgccccattcctgggcctgcccggca

SEQ ID NO: 6481 - DNA, 92 bp, homo sapiens
agatcattggatttaaaaattatgttacaattgtgttagctcgccattactagtatactattactaatgagatcattggatttaaaaattat

SEQ ID NO: 6482 - DNA, 103 bp, homo sapiens
aaaatgtttgctgcttagataaaagatgatataagtaaatgaatgcatataagtatgtatgaatgaatggctaagaaaatgtttgctgcttagataaaagatg

SEQ ID NO: 6483 - DNA, 149 bp, homo sapiens
ctggggtgagaggaggctggtggcagcggtgtggatggaggctggggtgggggaggctggcggcagtggtgtgggtggagcctggggtgaggggaggctggtggcagccgtgtgggtggaggctggggtgaggggaggctggcagcagc

SEQ ID NO: 6484 - DNA, 81 bp, homo sapiens
cccaatctgtcaatcccgatccgtaagccttcggggaagggctgcctttcccactgccccaatctgtcaatcccgatcctt

SEQ ID NO: 6485 - DNA, 128 bp, homo sapiens
tgtgtgtgtgtgcatgcgtgtgtgtattccaggagctgactctagttgtcaggatggctcccctgtgtgtgtatatgtgtgtgtgtgcgtgtgcatgtgcgtgtgtgtgtttcaggagctgaccctgg

SEQ ID NO: 6486 - DNA, 116 bp, homo sapiens
tgcacccatccccttcttgccagtgaaggagctccgtcccacacggccctgcccctgcacgggtggcaccctttctgtgcacccatccccttcttgccagtgaaggagctccgtcc

SEQ ID NO: 6487 - DNA, 90 bp, homo sapiens
gggccctccataaacttgttaaaatcgaaacgcccccacccaagggtgagccttcatcagacacgggccctccacaaacttgttaaaatc

SEQ ID NO: 6488 - DNA, 121 bp, homo sapiens
tccttgagaaacccttgtctctcaattttcagggaggctgatttgagtaataaaactctgtccccctacccaccaaactatccttgagaaacccttgtctctgaattttcagggaggctga

SEQ ID NO: 6489 - DNA, 136 bp, homo sapiens
gaacccagggcaaggcaggaaggggtggggggcagagactgatggtttccctcatacccactgtgcagtactctcaggaccagagaacccagggcaaggcaggaaggggtggggggcagagactgatggtttccct

SEQ ID NO: 6490 - DNA, 79 bp, homo sapiens
taggaagttccaaactttcctacatctttctgtcttctgagccctccaagtctctaggaagttccaaactttcccacat

SEQ ID NO: 6491 - DNA, 139 bp, homo sapiens
cactccaggctgggcaacagagtgagactccatctcagaaaagaaaagaaagaaaagaaagaaagaaagaaaaaaatttgtgctgtttaaaaggctacactccaggctgggcaacagagtgagactccatctcagcaaa

SEQ ID NO: 6492 - DNA, 107 bp, homo sapiens
tgtcactgcccttactgggtttataacactctgacaaccctgcctcattgatatttcgcatgattatctctgtcactgcccttactgggtttataacactctgacaa

SEQ ID NO: 6493 - DNA, 93 bp, homo sapiens
tattcacaatggaatactattcagccataacatagaattgtgaggaatataggaatatatattcctgtattcaccatggaatactattcagcc

SEQ ID NO: 6494 - DNA, 82 bp, homo sapiens
tgtaactatagtgaaatagcaaagaagctgatgacactcctatattatatatgtagttatgtaactatagtgcaatagcaaa

SEQ ID NO: 6495 - DNA, 77 bp, homo sapiens
gtgtgtggcactggacactgcctatgcgctgccacgtgtcacaactaaactgcagtgtgtggcactggacactgcct

SEQ ID NO: 6496 - DNA, 114 bp, homo sapiens
aaaaactatatttttattccataacagtgattcacacataataatatgcattattattaatatttaacaaaacatacgtaattcataaaaactatatttttattacataacagt

SEQ ID NO: 6497 - DNA, 109 bp, homo sapiens
cagacacctatttatatgtgtcatcgtagttcccctgacagctcccagaaccagatattataccaggcagatataccaggcttacaggcacctatttatatgtgtcatc

SEQ ID NO: 6498 - DNA, 81 bp, homo sapiens
ccaccatgcccagctagtatgtgtttgtctgtgtgtgtgtgtgtgcacgcgcgtgtgccaccatgcccagctagtgtgtgt

SEQ ID NO: 6499 - DNA, 120 bp, homo sapiens
ggcatcgggtgagggcatagggaaagcacaggtgtccatggactttctgttgatggggaggcaggcacacagagcaaagggaggcatcgggtgagggcatagggaaagcacaggtgtcca

SEQ ID NO: 6500 - DNA, 94 bp, homo sapiens
ccattatatatgttgggggtggggaactaacaaaaccagatgatgttactagcttgctataaaactaaaagccattatatatgttggggatggg

SEQ ID NO: 6501 - DNA, 116 bp, homo sapiens
agctagtcttctttccaaataagggaaggaatagtaatagtaagaaatagtaagaaagaaaataaagaaatagtaataaaggaaagctagtcttctttccaaataaggaaaggaat

SEQ ID NO: 6502 - DNA, 108 bp, homo sapiens
caccaatcggcactgtgtatctagctcaaggtttgtaaacacaccaatcagcaccctgtgtttagctcaaggtttgtgaatgcaccaatcgacactctctatctagct

SEQ ID NO: 6503 - DNA, 90 bp, homo sapiens
aaaataacttatctaaattaactttatctaaattaaaatttaaaaagtaattaattaaagtttatttatttaactttatctaaattaaaa

SEQ ID NO: 6504 - DNA, 155 bp, homo sapiens
ccaatggacactctgtatctagctcaaggtttgtaaacacaccaatcagcaccctgtgtctagctcagggttgtgagcgcgccaatcgacactctgtatctagctgctctggtggggccttggagaacctttgtgtggatactctgtatctaact

SEQ ID NO: 6505 - DNA, 93 bp, homo sapiens
atctgcagaatgtaaatttcaattctagaatctaaatctgcagaatgtaaatctcaatcctagaatctaaatctgcagaatgtaaatctcaat

SEQ ID NO: 6506 - DNA, 75 bp, homo sapiens
aatgtcatcagttaaggcaggaacaggacattttcatttattttgtggtggaatgtcatcaattaaggcaggaac

SEQ ID NO: 6507 - DNA, 105 bp, homo sapiens
gggggcctcacccccttgcgatgggggtcctaatagccagggggggataggggctggctgttactccccgtacagttgggggggcctcacccccctgcgatgggg

SEQ ID NO: 6508 - DNA, 130 bp, homo sapiens
ggggggaagaggggctggctcttactccccgcatcgcggggggcgcctcaccccccgccccctgcgatgggggtcctaagagccagtggggggaagaggggctggctcttactccccacatcgcgggggg

SEQ ID NO: 6509 - DNA, 88 bp, homo sapiens
tctctccaggtgacaggaacagcatgagcttgttgtcctcacaaccttgctgttcctgtcatcttctctccaggcgacaggaacagca

SEQ ID NO: 6510 - DNA, 121 bp, homo sapiens
tgctgcatcggtgagcgcaactattccgatcagcagggtcctgggactgttgctggttcttgggcaggggttgtttctgctgctgcgtcggtgagcgcaactattccgatcagcagggtcc

SEQ ID NO: 6511 - DNA, 112 bp, homo sapiens
gctgaggcaggagaatcgcttgaacccaagaggcagaggttgcagtgagctgagattaaaccattgtaatcccaggtacttgagaggctgaggcaggagaatcgcttgaacc

SEQ ID NO: 6512 - DNA, 98 bp, homo sapiens
atatgacacttaccatgaatggagcttgcagattacagtataaaagataaaaaacggtacaccggtatatgacacttaccatgaatggaacttgcaga

SEQ ID NO: 6513 - DNA, 122 bp, homo sapiens
tctcagtccccacctcgcggggggtgccatcccccccctgcgatgggggtgccttccccccccctgcgatgggggtcccttcccccccctgcgatgggggtcccttcccccccctgcgatga

SEQ ID NO: 6514 - DNA, 89 bp, homo sapiens
ctcaacctctcctactagagatttcttgccctcccttcttctagaagctgtgtgtgagtctcaatctctcctactagagatttcttgcc

SEQ ID NO: 6515 - DNA, 75 bp, homo sapiens
aatgtcatcagttaaggcaggaacagaccattttcacttcttttgtagtggaatgtcatctgttaaggcaggaac

SEQ ID NO: 6516 - DNA, 160 bp, homo sapiens
tataggaattcaaatgacatgtctggaaattagggataatgtctacctgataacattgttataggaattcaaatgacatgctgggtaaaaataataagcttttttacactaggtttgtgaaaaatgtcacgttgctataggaattcaaatgacacgctgg

SEQ ID NO: 6517 - DNA, 186 bp, homo sapiens
agctagatacagagtgtccattggtgcattcacaaaccttgagctaaacacagggtgctgattggtgtgtttacaaaccttgagctagatacagagtgccgattggtgtatttacaatccctgagctagacataaaggttctccaaggccccaccagagcagctagatacagagtgtcgattggtg

SEQ ID NO: 6518 - DNA, 106 bp, homo sapiens
aactaccatgtgcccatcacccagcttcaactcactccccaatcaaggtgagtgtgtatctcccatgagtgagtaaactaccacgtgcccatcacccagcttcaac

SEQ ID NO: 6519 - DNA, 85 bp, homo sapiens
ttctataaataatacaaaaattagctgtgtgtggtgatgtgcaggtgtattacgtattttctataaataatacaaaacttagctg

SEQ ID NO: 6520 - DNA, 86 bp, homo sapiens
gctgaggcaggagaattgcttgaacctaggaggtagaggttgcagtcccaggtacttgggaggctgaggcatgagaattgcttgaa

SEQ ID NO: 6521 - DNA, 106 bp, homo sapiens
aaccaatcagactgatcacaggccaagtcttcatgtgtaaccttgtaactttacttcagcctcctattggtcaccttctgcaaccaattagactgatcacaggcca

SEQ ID NO: 6522 - DNA, 98 bp, homo sapiens
gctctctcctcagctgctgattgctccaaaaattaagtttccaaaaagccctgtcagagtcctggttttgtcgctctctcctcagctgctgattgctc

SEQ ID NO: 6523 - DNA, 125 bp, homo sapiens; identical to SEQ ID NO: 5197

SEQ ID NO: 6524 - DNA, 102 bp, homo sapiens
ttggtgcattttacaatcctcttgctagctacagagcgctgattgctgtggttttacagtgcactgtttggtgcattttacaatccccttgctagctacaga

SEQ ID NO: 6525 - DNA, 88 bp, homo sapiens
ggggtacttgcccctcccccagaaaagcagagaaggggtagagagaaggagagaaggggttggggtacttgccccttccccagaaaag

SEQ ID NO: 6526 - DNA, 158 bp, homo sapiens
ttctgcctcattctagttgctgtcagtgggtaaatgtgttcatagattagaacaagttgcagcacagacttttggagcttctcttgtcactgccctgggtcttatttctgcctcattctagttgctgtcagtgggtaaatgtgtcatagattagaacg

SEQ ID NO: 6527 - DNA, 76 bp, homo sapiens
ctcaaagtatttttctaatttcccttgtaatcacaattgccatctattttcctcaaagtatttttctaatttctct

SEQ ID NO: 6528 - DNA, 125 bp, homo sapiens
agtaaagacaggcataagaaattataagagtattaatagggaagtgataaatgtccatgaaatcttacaatttgtggttagagattgcagtaaagacaggcataagaaattataaaagtattaat

SEQ ID NO: 6529 - DNA, 75 bp, homo sapiens
aatgtcatcagttaaggcaggaacaggccgttttcacttcttttgtggtggaatgtcatcagttaaggcaggaac

SEQ ID NO: 6530 - DNA, 67 bp, homo sapiens
aaatatgcagcgaataatttaagtgaagcgaaatatgcagcaaataatatgcagcgaaatatgcagc

SEQ ID NO: 6531 - DNA, 117 bp, homo sapiens
caccagattaaaggtggatctgccttctccagcccattttctgcctgctttgtattcattgatagctgattagattgtgcacaccagattaaaggtggatctgccttccccagccca

SEQ ID NO: 6532 - DNA, 158 bp, homo sapiens
gggtttcaccatgttgaccaggctggtctcgaaatcttgacctcaggtgatctgccggcctcccaaagtgcccagctaattttttgtgtttttaatagagacagggtttcaccatgttgaccaggctggtctcgaaatcctgacctcaggtgatctgc

SEQ ID NO: 6533 - DNA, 94 bp, homo sapiens
gtagctcctttctgcaggcaggtcatcccaacaagtgtccagctctcagtagagaggagacctgtagtgggtagctcctttttgcaggcaggtc

SEQ ID NO: 6534 - DNA, 118 bp, homo sapiens
tctcccttgtacactcctgatggccttcttaaatgcttggggaacagagccaccactgaacttcttgttgattctggtgtccctctcccttgtacactcctgatggccttcttaaatg

SEQ ID NO: 6535 - DNA, 77 bp, homo sapiens
agagtccccactagaggaatgcccagcagagccatataagcagggctactacagagagtccccactagagcaatgcc

SEQ ID NO: 6536 - DNA, 116 bp, homo sapiens
tatatcctctgaaaaatctagcaaatatgttatatttatatttttgtatgtatttatgttatattttatattgtatatatagtgtatatatcctctgaaatatctagcaaatatgt

SEQ ID NO: 6537 - DNA, 96 bp, homo sapiens
tccatttcttcatggttcatttttttaaattacagattcaatctccctgttaggtatgtctatttaggttttccatttcttcatggttcagttttt

SEQ ID NO: 6538 - DNA, 88 bp, homo sapiens
ggggtacttgtccctcccccagaaaagcagagaaggggtagagacatggagagaaggggttggggtacttgcccctcccccagaaaag

SEQ ID NO: 6539 - DNA, 78 bp, homo sapiens
gggctgtaacattttcctggccagctcaccaagctgtgggcagaaacaaaaggggctgtaacatgttcctggccagct

SEQ ID NO: 6540 - DNA, 77 bp, homo sapiens
tcattcacccacattccattggtgtctgatcatcacagggacgcctgccttggtcattcacccacattcccttggtg

SEQ ID NO: 6541 - DNA, 81 bp, homo sapiens
attaagtagatttaggggacatttctttatcatcccgataccagagacctcatgcattaagtagatttagaggacatttct

SEQ ID NO: 6542 - DNA, 80 bp, homo sapiens
tgacattccacacatcatcagggaactgatgatttgacattccatgattgatttgacattccacacatcatcagggaact

SEQ ID NO: 6543 - DNA, 86 bp, homo sapiens
ttatgctgataaggtggctagacaagcagctagctttccaatttctgtctctcagagcaacacttatgctgataaggtggctagac

SEQ ID NO: 6544 - DNA, 79 bp, homo sapiens
gtactattaactgagcacattctaagagttttgctgatttatcctcatcatagtacttactattaactgagcacattct

SEQ ID NO: 6545 - DNA, 78 bp, homo sapiens
aaagagaaaagctctctttcctggagtttaagagtggaggcttattagtcaagagaaagagaaaagctctctctcctg

SEQ ID NO: 6546 - DNA, 107 bp, homo sapiens
ttcaacaatgactttcttgagatcactggcatgagtcaccaactgcattttatagatgcaacagttgaatatcctaaaattgttcaacaattactttcttgagatca

SEQ ID NO: 6547 - DNA, 108 bp, homo sapiens
tacatattacacatattaattgattaattaacaggtaatattacatattacacatattaattgattaattaacatgtaatattacatattacacatattaattgatta

SEQ ID NO: 6548 - DNA, 103 bp, homo sapiens
attttcctcaatttgcaataatagtaataaaagtaataatactgactagagtgttttcaatttaaagttatttgccacacattttcctcaatttgcaataaca

SEQ ID NO: 6549 - DNA, 106 bp, homo sapiens
ggctcatgcctgtaatcccagcactttgggaggccgagctgggtggatcaaatagatgaattaggccaggtctggcggctcatgctgtaatcccagcactttggga

SEQ ID NO: 6550 - DNA, 98 bp, homo sapiens
gttgaccaggctggagtgcaatggcgtgatactttattttattttattttattttttgagacggagttttgctcgttgaccaggttggagtgcaatgg

SEQ ID NO: 6551 - DNA, 92 bp, homo sapiens
ttcctgcccttcttgtatgggcaataagaaggttttaccctcatttgtttaagaatagttttttcctgcccttcttgtatgggtaataagaa

SEQ ID NO: 6552 - DNA, 94 bp, homo sapiens
atggagagattaaagattttgatgaaataatgtcttagatatttttacagtgaaaggaaggaaactttcagatggagagattaaagactttgat

SEQ ID NO: 6553 - DNA, 65 bp, homo sapiens
gctgattggtgcatttacaatcctttagctagacacagagtgctgataggtgcatttaaaatcct

SEQ ID NO: 6554 - DNA, 203 bp, homo sapiens
acatcctgctgattggtccattttacagagagccaattggtccattttatagagagctgattggtctgttttacagagagctgattggtctgctttgacagagtgctgattggtgcatttacaaacctttagctggacacaagagtgctgattagtgcgtttataatcctttagctagcacagagtgctgattggtgcattta

SEQ ID NO: 6555 - DNA, 186 bp, homo sapiens
agctagatacagagtgtcgattggtgcattcacaaaccttgagctaaacacagggtgctgattggtgtgtttacaaaccttgagctagatacagagtgccgattggtgtatttacaatccctgagctagacataaaggttctccaaggccccaccagagcagctagatacagagtgttgattggtg

SEQ ID NO: 6556 - DNA, 82 bp, homo sapiens
ggaaagtttggaacttcctagagacttggagatctcagaagacaagaagatataggaaagtttggaacttcctagaaacttg

SEQ ID NO: 6557 - DNA, 111 bp, homo sapiens
agtatgctaagcattttagagagatcatgaatcctcattttgcttccctttgtttgctcttttcccttttgctaattttctcctagtatgctaagcattttagagatatca

SEQ ID NO: 6558 - DNA, 148 bp, homo sapiens
aaatatatgaaattctatatgaatatatgaatttctatatgaaaatatagaaatatagaaatatatgaatttctatatgaaaatataacatatccttctattagtaaatgatttgtaaaaaaaaaaaagaaaagaagtgctatattta

SEQ ID NO: 6559 - DNA, 118 bp, homo sapiens
ggatttagtggtccttactgatgcattctcgaaaacctgcacctctgcctgtcctcctagaccacaaggaggactgactgaggaaaatcggatttagtggcccttactgatgcattct

SEQ ID NO: 6560 - DNA, 99 bp, homo sapiens
ttgaatgataaaatagaagtctgtgtggcctctgtatagcagattggagctataacctatggatgttaacaaaatgttgaatgataaaatagaagtttg

SEQ ID NO: 6561 - DNA, 89 bp, homo sapiens
ggggtacttgcccctcccccagaaaagcagagaaggggtagagacatggagagaaggggttggggtacttgcccctcccccagaaaagc

SEQ ID NO: 6562 - DNA, 77 bp, homo sapiens
gtttggaacttcctagagacttgcagggctttggagacaggaaaatgttggaaagtttggaacttcctagagacttg

SEQ ID NO: 6563 - DNA, 197 bp, homo sapiens
gttattcaatattaatgtgtttatttacttggatttaacaacttatcatctatgaagaaacaaggcattaccagtgaaagttaagttattaaatattaatgtgtttatttacttggatttgtttggaacttcctagagacttgcagggctttggagacaggaaaatgttggaaagtttggaacttcctagagacttg

SEQ ID NO: 6564 - DNA, 94 bp, homo sapiens
tgaatgactactgggtaaataacgaaatgaaggactacatggaaactgaacaacctggtcctgaatgactactgggtaaataacgaaatgaagg

SEQ ID NO: 6565 - DNA, 131 bp, homo sapiens
aagctaagccactgggatgaatcagagatgttaggcagaaaaaggaaaaaaagagacatcctccttccccctcttttccctgcctccttctcaagctaagccactgggatgaatcagagatgtcaggcaga

SEQ ID NO: 6566 - DNA, 139 bp, homo sapiens
aagcagaactactaataagggtctaacaaagatcacatgcttttgagggaacaggacaaaaggcataagcagaactactgataagggtccaacaaagatctcaaggcaaagggcaaaagcagaactactgataagggtc

SEQ ID NO: 6567 - DNA, 81 bp, homo sapiens
aggccctcaccagatgtagcccctcaccagatgtaaccccttaaccatgttaagaaggccctcaccagatgtagcccctca

SEQ ID NO: 6568 - DNA, 101 bp, homo sapiens
tctccctgcctcttcctccttcccctaccactcatacctctccccgcctctacctccttcgcctaccactaacacctctccctgcctcttcttccttcccc

SEQ ID NO: 6569 - DNA, 99 bp, homo sapiens
aaccaatatgttatttattattacattatagtataaatattatactggtatattttggttttatatttatagtatcaaccaataggttatttattatta

SEQ ID NO: 6570 - DNA, 107 bp, homo sapiens
agaatttccatctttttaaaggctgcggttagggggaagccactgtatatatacaaaacagaatactatacagcctttacaaagaatttccatctttttaaaggctg

SEQ ID NO: 6571 - DNA, 98 bp, homo sapiens
ttataaatacttgtgcaaaagtgtgtgtgtgtgttctcataataactttttggttatgattagtgctgttataaatacttgtacaaaagtgtgtgtgt

SEQ ID NO: 6572 - DNA, 82 bp, homo sapiens
tttggttcatatctattcaattagcagaggtaaataaaataatattttctaagcttatttttggttcatatctattccaatt

SEQ ID NO: 6573 - DNA, 86 bp, homo sapiens
tattcaaagataagagatgtcatatatgattccatatattaggactttattgtgcaaatatgtattcaaagataagagatggcata

SEQ ID NO: 6574 - DNA, 91 bp, homo sapiens
attcagttcaaaaacaataaaattattgaaataataaaaattttgaaaaaattcaaaaattattaaaaattcagttcaaaaacaatcaaat

SEQ ID NO: 6575 - DNA, 102 bp, homo sapiens
caaccagctatgtgagttttccagtagacatatatagcagctatatgagtttggcaatgggcattaagctacatgagtttgcagctatatgagtctggcaat

SEQ ID NO: 6576 - DNA, 100 bp, homo sapiens
ccaaccccttctctccgtgtctctaccccttctccgcttttctgggaggcaagaatcccccgacccttctctccatgtctaccccttctccacttttctg

SEQ ID NO: 6577 - DNA, 106 bp, homo sapiens
tgttttgtgttgctaaaaaggaatgctcgaagctgagtaatttataaagaatgggtaatttataaagaatttataaagaatgttttgtgttgctataaaggaatgc

SEQ ID NO: 6578 - DNA, 211 bp, homo sapiens
aaaaattaactgggtgtggtggtgcacacctatagtccatcttggtcaacataccaagacctcatcgctactaaaaatttaaaaattaactgggtgtggtggtgtacacctatagtccatcttggtcaacagagcaagacctcatctctactaaaaattaaacaattaactgtgtgtggtggcgcacacctatagtccaagctacttggga

SEQ ID NO: 6579 - DNA, 101 bp, homo sapiens
ttagtggtagtgttgttagtggcatgattagtggctattatccacagtcaatacttatccatgtcagttatgttagttgtagtgttgttagtggcatgatt

SEQ ID NO: 6580 - DNA, 100 bp, homo sapiens
ataaaatacacataaaatgaaatatacatacaataaatatacatacatatacataagtatgtaaatttatacacatatgtaaatatacatacaataaata

SEQ ID NO: 6581 - DNA, 107 bp, homo sapiens
acatggatgaaaactactattcatagtccatgactttttgacatggatgaaacaattattcattaaaatctatgactttttgacatggatgaaaactattattcata

SEQ ID NO: 6582 - DNA, 117 bp, homo sapiens
acccaaaagctaactttagggtaagtggtggtgtcctataacatctttctggtgaccacggaagcaactatagtgcagaaacccccaacccaaaagctaactttgggtaagtggtgg

SEQ ID NO: 6583 - DNA, 78 bp, homo sapiens
ggaggatctcttgggcctgggatctcctgggccagctactcaggaggctgaggtgggaggatctcttgggcctgggat

SEQ ID NO: 6584 - DNA, 72 bp, homo sapiens
acacacacacacacagcagtaggagaactggaaggaaccacacacacacacacacacacacacacacagcag

SEQ ID NO: 6585 - DNA, 149 bp, homo sapiens
taaagtaaggagtataaagtaaggagtatgtaaggagtaagtaaggagtataaaggaaggagtataaagtaaggagtataaaggaaggagtatgttttagaaaatcacaggagtatagtaaagtaaggagtataggagtatcagttggt

SEQ ID NO: 6586 - DNA, 108 bp, homo sapiens
ttagctagacacagagcgctgattggtgcatttacaatcctttagctacacagaaaagttctccaagtcccctacccgattagctagacacagagtgctgattggtgc

SEQ ID NO: 6587 - DNA, 107 bp, homo sapiens
acagttttaaggagtattggtcagacatttcctggctgtggtggtttcttaaactttacttggttttgatgaccttgacagttttgaggagtattggtcagacattt

SEQ ID NO: 6588 - DNA, 115 bp, homo sapiens
tttttattttgcaaagttgttttggatattttaggttctttgcatttccacataacttttataatccagtattgtttttattttacaaagttgttttggatattttaggttcttt

SEQ ID NO: 6589 - DNA, 77 bp, homo sapiens
agtggtgatttgtgagatttgggtgatatttggtttcatgcttaactcctttagtggtgatttgtgagattttggtg

SEQ ID NO: 6590 - DNA, 108 bp, homo sapiens
attcttaattccataatttgaattgatctttagtcaatataggcaaaatgatcagtagtagccaattatgaagtaagtaacaattcttaagtccataatttgaattga

SEQ ID NO: 6591 - DNA, 102 bp, homo sapiens
tgctaggataatttttttttctaatgtttggtctctgcccaattcctgagatagagtttctaatatgtacgtaggggtgctaggataattttttgttctaat

SEQ ID NO: 6592 - DNA, 114 bp, homo sapiens
gatttagtggcccttactaacacattctcaaaaacctgcacccttgcctgtcctcttagaccacaaagaggactgaggaaggtcagatttagtggcccttactgacacattctc

SEQ ID NO: 6593 - DNA, 159 bp, homo sapiens
tttagctagacacagagtgctgattggagcatttttacacagtgctggttggtgcatttacagtcttttagctagacacagagtgctgattggtgcgtttacaatcctttagctagacacagagcgctgattggtgcatttttacagagtgctgattgg

SEQ ID NO: 6594 - DNA, 74 bp, homo sapiens
ctgtatctagctactctggtggggccttggagaacctttgtgtggacactctgtatctagctaatctggtgggg

SEQ ID NO: 6595 - DNA, 130 bp, homo sapiens
aatttagaatgagtataattattgccattttcacaagtacaattggaactaggtaatttatattcctgtttactcttatgagaatttagaatcagtataattattgccattttcacaagtacaattggaa

SEQ ID NO: 6596 - DNA, 115 bp, homo sapiens
gaatagttgcgctcaccaacacagcagcagaaacaacccctgcccaagaacccgcaacagtccctggaccctgctgatcggaatagttgcgctcaccaacgcagcagcagaaaca

SEQ ID NO: 6597 - DNA, 125 bp, homo sapiens
ataaatgtccatgaaatcttcacaatttatgttcagagactgcagtaaagacaggcataagaaattataaaagtattaatttggggaactaataaatgtccatgaaatcttcacaatttatgttc

SEQ ID NO: 6598 - DNA, 77 bp, homo sapiens
tcctgagatctgtagattattaacaacacttcatctaaatactaagatgttttctcctgagatctgtatattattaa

SEQ ID NO: 6599 - DNA, 106 bp, homo sapiens
ccctgttgtgctatcaaatacaaatgcctattcattcattctattttcgaacccattagccatccccacctccccgtctccaccctgttgtgctatcaaatactaa

SEQ ID NO: 6600 - DNA, 111 bp, homo sapiens
attgtgaagatttcatggacatttattagttccccaaattaatacttttataatttcttttgcctgtctttactgcaatctctaaattgtgaagatttcatggacacttat

SEQ ID NO: 6601 - DNA, 108 bp, homo sapiens
caccaatcggcactctgtatctagctcaaggtttgtaaacacaccaatcagcaccctgtgtttagctcaagatttgtgagtgcaccaatcgacactctgtatctagct

SEQ ID NO: 6602 - DNA, 138 bp, homo sapiens
gacattaatcttccctccatgtatgtgacagccaacccccaaaccaggacactggctcagataggttaggtgacctgcccaaggtcctgcagccagtaagacattaatcttccctccatgtatgtgacagcccaaccc

SEQ ID NO: 6603 - DNA, 91 bp, homo sapiens
aagcagtggaggtggatgggaggagatcgaagggctgggatgggggtcccgtgaccagggtaagcagtggaggtggacgggaggagatcga

SEQ ID NO: 6604 - DNA, 106 bp, homo sapiens
aatgttcccttatgctacccacctacgagcctgttagtgaaatgttcccttatgctatctacctacgagcctgttagtggaatgttcccttatgctacctacctac

SEQ ID NO: 6605 - DNA, 125 bp, homo sapiens
aaaaaaacttttaacatataatttaacatccaatgaactatttaagatgatagaatattatcctcagagtactaaggaaaaaaaaaaaacttttaacatagaatttaacatccaatgaactattt

SEQ ID NO: 6606 - DNA, 84 bp, homo sapiens
ataagctacaggtctgcctttcttcatggtccagaacatataaacaaaaagaagaagcagataagctataggtctgcctttctt

SEQ ID NO: 6607 - DNA, 113 bp, homo sapiens
aaagaaagagtcctagatgagagagagagagagtcctagatgagagacagtgaaagcaagaaagaaagaaaggaagagagaaagaaagagtcctagatgagagagagagagag

SEQ ID NO: 6608 - DNA, 186 bp, homo sapiens
agctagatacagagtgtcgattggtgcactcacaaaccttcagctaaacacagggtgctgattggtgtgtttacaaaccttgagctagatacagagtgccgattggtgtatttacaatccctgagctagacataaaggttctccaaggcccaaccagagcagctagatacagagtgtcaattggtg

SEQ ID NO: 6609 - DNA, 93 bp, homo sapiens
ctctgtgtctagctaacggattgtaaatgcaccaatcagcactctgtaaaaatgtaccaatcagcgctctgtgtctagctaaaggattgtaaa

SEQ ID NO: 6610 - DNA, 87 bp, homo sapiens
ttttttgagacggagtctcgctctgtcacgcaggctggaatctactataaatgcatttttttttttttagacggagtctcgctctgt

SEQ ID NO: 6611 - DNA, 108 bp, homo sapiens
caccaatcggcactctgtatctagctcaaggtttgtaaacacaccaatcagcaccctgagtttagctcaaggtttgtgaatgcaccaatcgacactctgtatctagct

SEQ ID NO: 6612 - DNA, 96 bp, homo sapiens
ttttttgggtgggagattttcctgttttactgcattagttcatatttactactcataatgttaaaagggttttttggtgggagattttcctgtttt

SEQ ID NO: 6613 - DNA, 93 bp, homo sapiens
caatatagtgagaccctgtctacacacacacacaaacacacacacacacacacacacacacacacacaatatagtgagaccctgtctacacac

SEQ ID NO: 6614 - DNA, 77 bp, homo sapiens
taagtctgcacatgctaggtgaaatgtgcattcatatattgaacatacatgctctaagtctgcacatgttaggtgaa

SEQ ID NO: 6615 - DNA, 79 bp, homo sapiens
attttattaaaattaaagactgcttatgaagtttttattttattatagtgcttattttattaaaattaaaaactgctta

SEQ ID NO: 6616 - DNA, 125 bp, homo sapiens
ataaatgtccatgaaatcttcacaatctatgttcagagatggcagtaaagacaggcgtaagtaattataaaagtattaatttggggaactaataaatgtccatgaaatcttcacaatttatgttc

SEQ ID NO: 6617 - DNA, 108 bp, homo sapiens
gacctgaaatgcagagacaatacttattgaagtgcagagacaataaaagacaataaaaggacaataaaagacaaagacaatatttactgaagtgcagagacaataaaa

SEQ ID NO: 6618 - DNA, 97 bp, homo sapiens
tttctaaccaaactgtaaaatgtttgtgtaagactacatttgtggtaatttctaaccaaactgtatttctaaccaaactgtaaaagatttctaacca

SEQ ID NO: 6619 - DNA, 97 bp, homo sapiens
tcaggattaagaaactcactcaaaaccacacaactacatggaaactgaacacagtgccatcaaattagaactcaggattaagacactcactcaaaac

SEQ ID NO: 6620 - DNA, 160 bp, homo sapiens
tatgtcaaaacttatcaaattataatcttgaaatatttatagtttattgtatgtcagtttgacatatgtatatgtctgtctgtattatgtatcagatgggcatgtacatatgtcaaaacttatcaaattataaccttgaaatatttatagtttattgtat

SEQ ID NO: 6621 - DNA, 79 bp, homo sapiens
agtttctaggaagttccaaactttcccaaattttcctgtcatttgagccctcagagtctctaggaagttccaaactttc

SEQ ID NO: 6622 - DNA, 107 bp, homo sapiens
gctgaatgaaaagaaaggtttaactctgtgagataaatgcacatttcacaaagaggtttctcacatagctctttcaaaacagctgaatgaaaagaaaggtttcactc

SEQ ID NO: 6623 - DNA, 151 bp, homo sapiens
gagctgtaacactcactgcaaaggtctgtggcttcactcctgaagtcagcaagaccacgagcccaccaggaggaacaaacaactccagaatcaccacttttcagagctctaacactcactgcaaaggtctgtggcttcactcctgaagtca

SEQ ID NO: 6624 - DNA, 96 bp, homo sapiens
ttttacaagttgttttatatagctaccccttcattaatgcttctataaatatcatttatccagcatctatttttacaagttattttatatagatac

SEQ ID NO: 6625 - DNA, 162 bp, homo sapiens
gagtgtgagaaatctccagtgggggggttgagtctctagagaaagagtgcaagaaatctccagtaatgggagttgagcctctaaggaaaagggtgcaagaaatctctagcaagagaggttgagccctgcaaactcacttgggtgcaagaaatctctagtaag

SEQ ID NO: 6626 - DNA, 86 bp, homo sapiens
tcatcatttagagaaggggcaccagaagtgaaacatgtatagagtaaagtgtgagaaaagctttcatcatttagagaaagggcacc

SEQ ID NO: 6627 - DNA, 113 bp, homo sapiens
attattccaatagctaggaatattatttttcctagaatattcctagatgtaggaatattattttactaggaatattattgttcctaaaatattcctagatctaggaatattat

SEQ ID NO: 6628 - DNA, 129 bp, homo sapiens
agcacccagatttataaagcaagttcttagagacctactaaaatacttagactcccagacaataagagtgggagactttaacaccccacttagcacccagattcataaagcaagttcttagagacctac

SEQ ID NO: 6629 - DNA, 124 bp, homo sapiens
cctgtaatcccagcactttgggaggctgagggtagactacttccctattacatttaaaatgcaagttcaccagctgggcacagtagctcacacctgcaatcccagcactttgggaggctgaggg

SEQ ID NO: 6630 - DNA, 100 bp, homo sapiens
ttcaggatatattgtgattaatatatattattaataatatatattaattaataatatattaataattaataatacacttcaggacatattgtgattaata

SEQ ID NO: 6631 - DNA, 73 bp, homo sapiens
ctcattgagatataatgggatttaccaaacaacaaataagactatacaactcatttagatataatgggattta

SEQ ID NO: 6632 - DNA, 93 bp, homo sapiens
ggataattttagctatgtttgtatatagctcattctaacatagaaagatggatagttacagggataattgtagctatgtttgtatatagctca

SEQ ID NO: 6633 - DNA, 89 bp, homo sapiens
tctttaatgtttctcagtaaacaatatcatgttctcaattacatattcctttatttgtgtcttctttactgtttctcagtaaacaatat

SEQ ID NO: 6634 - DNA, 78 bp, homo sapiens
tttttttttttgtatttttagtacaggtgcccaccaccatgcccagctatttttttttattttttattttttgtattt

SEQ ID NO: 6635 - DNA, 86 bp, homo sapiens
aatccaatttctccctcacatcacatttttaaaatccaatttccccaaaatccaatttcccccaatccaatttctccctcacactc

SEQ ID NO: 6636 - DNA, 154 bp, homo sapiens
acaaacctgcacattctgcacatgtatcccagaacttaaagtacatatattatacatatatggcacgtgcataccttcataacaaacctgcacatacctatgtaacaaaactgcacattctgcacatgtatcccagaacttaaagtacatatat

SEQ ID NO: 6637 - DNA, 113 bp, homo sapiens
gtcactctctgcccttggtctggagagcatatgacatttccagatctctctctgtctttggtctagagagtacatggcacttccaggtcactctctgcccttggtttggagag

SEQ ID NO: 6638 - DNA, 140 bp, homo sapiens
taattgatatatttacaaataagagaatgttaaattacttctgagatgctgtaactgatatattgatatatttacaaataagactgatatatttacaaattgtaattgtaatgttataattgatataattgtgtaattga

SEQ ID NO: 6639 - DNA, 129 bp, homo sapiens
acatatatatattctggatatatttctgaatagactccatatatatatatatgttctgaaaagaccataaatgtattcactatacatatatatacatatatatattctggatatatttctgaatagact

SEQ ID NO: 6640 - DNA, 86 bp, homo sapiens
tttataaatatacattttaaggactgaattattatttggtgcaaaagtaaatgatgctatttataaaaatacattttaaggactga

SEQ ID NO: 6641 - DNA, 73 bp, homo sapiens
ttgagactgtatatatgtgtatctatacataagttgttgcttatgtatgttgaggctgtatatatgtgtatct

SEQ ID NO: 6642 - DNA, 96 bp, homo sapiens
taaatgatcattttaggacattattgctaaaactcattggttatttgagctgtggtgttatgagatgttctactaaatgataattttaggacatta

SEQ ID NO: 6643 - DNA, 72 bp, homo sapiens
attcttacatagattaatgacatagattaatgacattgttcttacatagattcttacatagattaatgacat

SEQ ID NO: 6644 - DNA, 117 bp, homo sapiens
aaagtcttaatagattttaaaagctaaatattttacaaagcatacactacaaacacaacacaggaccatatgttaggccacaaataaagtcttaatagattttaaaagctaaatatt

SEQ ID NO: 6645 - DNA, 79 bp, homo sapiens
tttatttggaataaaattccaaattaataaatttattataattataattattattttatttggaataaaattctaaatt

SEQ ID NO: 6646 - DNA, 128 bp, homo sapiens
cctgtaatcccagctactcaagaggctgaggcaggagaatcatttgaacctggaagccaaaggttgcggtgagccgagatcatgccattgcacctgtaatcccagctactcaggaggctgaggcagga

SEQ ID NO: 6647 - DNA, 95 bp, homo sapiens
tgggattacaggcatgagccaccacacctgacccaaggttcaagcaattctgcctcagcctcctgagtagctgggattacaggcatgcgccacca

SEQ ID NO: 6648 - DNA, 134 bp, homo sapiens
agactcgcttgaacccaagaggggaaggttgcagtgagctgggattgcaccattgcactccagcctgcgcaacaggctgtggcaggagactcgcttgaacccaagaggggaaggttgcagtgagctgcgattgc

SEQ ID NO: 6649 - DNA, 77 bp, homo sapiens
accatatcagtaccccaatagtttttcaacccttgccccttccctcccaccaaccatatcagtacccaatagttttc

SEQ ID NO: 6650 - DNA, 106 bp, homo sapiens
tccttgcgggcttcatgaccttgatttctggcggtcgtggggcagcacccgcaggtctacagtggggggaaggtgttcgatccttgtgggcttcatgaccttgatt

SEQ ID NO: 6651 - DNA, 93 bp, homo sapiens
agaggagaccctcagtgggtagctcctctccacaggtagctcatcccaatgagtgtccagctgtcagcagagaggagacccacagtgggtagc

SEQ ID NO: 6652 - DNA, 126 bp, homo sapiens
tcagattatcatggcagatgggaggcagaactagattgcagctccaacatggagcttctgtacagactgcagagctgattattcagattatcatggcagatgggagccagaactagattgcagctc

SEQ ID NO: 6653 - DNA, 111 bp, homo sapiens
tgggattattgtttattggtttaatattgggttaatgttgtttaatattaacatttaatattgggttaatattgctaatattgggatattgtttattggtttaatattggg

SEQ ID NO: 6654 - DNA, 113 bp, homo sapiens
atccacatcgcagggggtcgggcgccccccgcgatgcggggagtaacatctcccccctctcccccactggatattacgatccacatcgcaggggggcgggcgccccccgcgat

SEQ ID NO: 6655 - DNA, 88 bp, homo sapiens
acagggtgtacacccctgtgactttaaaagtaacacccgcctagaatattacgaataatataacagggtgtacacccctgtgacatta

SEQ ID NO: 6656 - DNA, 116 bp, homo sapiens
gtttatttatgtgtaaacacacatgtgtacacacacacacacacacacacacatatatataaagttttcttttcatggtgaaagtttagtttatttatgtgtaaacacacctgtgt

SEQ ID NO: 6657 - DNA, 118 bp, homo sapiens
ttgttcaaaatccataaaatgtacaaaactaagatcaaaactaatctgtatgatacaatgatggtagataaatgtcataatactttgttcaaaatccataaaatgtacaacactaaga

SEQ ID NO: 6658 - DNA, 85 bp, homo sapiens
ggcatattttcatttgcttaaagcctgtactggtccataattacagcagaccagtgatgggcatattctcatttgcttaaagcct

SEQ ID NO: 6659 - DNA, 94 bp, homo sapiens
ctcaagatatagcagtgaacaaagatacagcagtgtaatttttttctaataaaaattgattcacttaaatgctcaagatacagcagtgaacaaa

SEQ ID NO: 6660 - DNA, 118 bp, homo sapiens
ggtttcgccatgttggccaggctggtctcaagactccagggctcaagcgatccacacccggcaaattgttgtaattttagtagagatgaggtttcaccatgttggccaggctggtctc

SEQ ID NO: 6661 - DNA, 106 bp, homo sapiens
tatttttagatacagggtctcactctgttatccaggctggagtgcagtggtgtgattatagctatgtatgtatgtatgtatttttaaatacagggtctcactctgt

SEQ ID NO: 6662 - DNA, 87 bp, homo sapiens
aaaccccgtctctattaaaaatacaaaaattatcaagaccatcctggctaacatggtaaaaccccgtctctactaaaaatacaaaaa

SEQ ID NO: 6663 - DNA, 104 bp, homo sapiens
ctatttattcaatgatttataatcttcatttcttttcctttcttccttttttctcttcttttcttttcctttcctttctatttattcaatgatttatagtcttc

SEQ ID NO: 6664 - DNA, 117 bp, homo sapiens
caatgagaaactttcctttgagcacacaggcagaaagaaaaaggaaattgcactcaaacaaatggagagttacaatgagaaactttcctttgagcacacgggcagaaagaaaaagga

SEQ ID NO: 6665 - DNA, 104 bp, homo sapiens
aggttcttgccatgggtgaaaagggaacaggcagaaagttcaatttttaaccttgtctcataccttttaacaggttcttgccatgggtgacaagggaacaggca

SEQ ID NO: 6666 - DNA, 92 bp, homo sapiens
tgtttcctccattcagaggaatattaataggaacgttgatagaataagttagccattattgtttcctccatttagaggaatattaataggaa

SEQ ID NO: 6667 - DNA, 125 bp, homo sapiens
ataaatgtccatgaaatcttcacaatttatgttcggagattgcagtaaagacaggcaaaagaaattataaaagtattaatttggggaactaataaatgtccatgaaatcttcaaaatttatgttc

SEQ ID NO: 6668 - DNA, 150 bp, homo sapiens
ggggggctgacccccccacctcccttccagatggggcggctggccgggcggggggctaatgcccccacctccctcccggacagggcagctggcccggcgggcggctggccgggtggggggctgatgcccccacctccctcccggacaggg

SEQ ID NO: 6669 - DNA, 74 bp, homo sapiens
accctatgtaaatgaagaggataaagttacaaagtcatttactcagtgtacaccctatgtaaatggagaggata

SEQ ID NO: 6670 - DNA, 152 bp, homo sapiens
ttcagcacagcagaaactaccctcaccccatttttccctttcctgcagaaacctctctcccctccccttccctcccctctcctctcctttctgtatatagttcagcacagcaaaaactaccctcaccccatttttccctttcctgcagaaac

SEQ ID NO: 6671 - DNA, 116 bp, homo sapiens
ccccaccagattagctagatacagagtgttgattggtgtattcacaatccctgagctagacataaaggttctccaaggccccaccagagtagctagatacagagtgttgattggtg

SEQ ID NO: 6672 - DNA, 121 bp, homo sapiens
cttgaacccaagaggcagaggttgcagtgagccaagatcgagccattgcactccagcctgggcaccaaaagcgaaactcaggagaatgccttgaacccaggaggcagaggttgcagtgagc

SEQ ID NO: 6673 - DNA, 97 bp, homo sapiens
ggctcactgcaacctccgcctcccgggttcaagcaattcttctgcctcagcgtcctgagtagctgggactacaggctcactgcaacctccacctccc

SEQ ID NO: 6674 - DNA, 161 bp, homo sapiens
gctcctctctgtaggcaggtcatcccatggagtattcagttctcagcagagaggaggccctggagagggtggctcctctctgcaggcaggtcattcagacatctctgcaggtctctgaagctctctgcagagagagtagctcctctctgccaacaggtcat

SEQ ID NO: 6675 - DNA, 125 bp, homo sapiens
gaacataaattgtgaagatttcatggacatttattagttccccaaattaatactttcataatttattacgcctgtctttactgcaatctgtgaacataaattatgaagatttcatggacatttat

SEQ ID NO: 6676 - DNA, 92 bp, homo sapiens
ggattacattgaatctgcagattacaggcatgagccactacacctagcccatttttgggattttgatatggattacactgaatctgcagatt

SEQ ID NO: 6677 - DNA, 186 bp, homo sapiens
agctagatacagagtgtcgattggtgcactcacaaaccttgagctaaacacagggtgctgattggtgtgtttacaaacctttagctagatacagagtgccgattggtgtatttacaatccttgagctagacataaaggttctccacgtcctcaccagagcagctagatacggagtgtcgattggtg

SEQ ID NO: 6678 - DNA, 90 bp, homo sapiens
ccacctgcagagcttcttattgcaaccaaagcctctgtaatcatttgagggccaggttgatactcaccacctgcagagcttcttattgca

SEQ ID NO: 6679 - DNA, 109 bp, homo sapiens
gaatccctattgagaacaccactgccagccaatggttttaagagggtcaaacattggttcctgtgtcctctgtcagaatccctatcgagaacaccactgccagccaatg

SEQ ID NO: 6680 - DNA, 160 bp, homo sapiens
gagccaagatcacaccactgcactccagcctgggcgacagagcaagactccatttcaatataaataaataaataaataaataaataaataaataaataaatagttgggagccaagatcacaccactgcactccggcctgggcgacagagcaagactccat

SEQ ID NO: 6681 - DNA, 106 bp, homo sapiens
aatgtaaaaataattaaatctattgtttttctagaaggtattcaaatacctcattgctacctgagggtccaatgtaagaataattaaatctattgtttttctagaa

SEQ ID NO: 6682 - DNA, 106 bp, homo sapiens
ggcatggtggctcatgcctgtaatcctagcactttgtggggctgagacgggtggatcacctaaggtcaagagttcgaagccgggcacggtggctcatgcctgtaat

SEQ ID NO: 6683 - DNA, 136 bp, homo sapiens
tctgcagctggttgtcccaatgtttctgcagctggttgtcccaatgtctctgcagctctcagcagagaggaggccctggagtgggtagcttctctctgcagctggtggtcccaatgtctctgcagctctcagcaga

SEQ ID NO: 6684 - DNA, 96 bp, homo sapiens
acaaggcattatttgggaatatatatatgtgtgtgtatatatacacatatacatatatacatatatacacacaaggcgttatttgggaatatatat

SEQ ID NO: 6685 - DNA, 92 bp, homo sapiens
acaatgttctttattcatgtgatgagtacactagaatcccaaattccaccatacacaatataacaatgttcattattcatgtgatgagtaca

SEQ ID NO: 6686 - DNA, 127 bp, homo sapiens
aaattgtgaagatttcatggacatttatcagttccccaaattaatacttttataatttcttacacctgtctttactgcaatctctgaacataaattgtgaagatttcatggacatttatcacttccc

SEQ ID NO: 6687 - DNA, 99 bp, homo sapiens
ggttgaggggtacttgcccctgccccaggaaagcgggacttgccgctaagagtgaaggggaagtggttgaggggtactttcccctgccccaggaaagcg

SEQ ID NO: 6688 - DNA, 101 bp, homo sapiens
tttaatagagaaaataaaactcaaaacacaataaaaactcgagaatattgaacctctaatgattttaaatataatatttaatagagaaagtaaaactcaaa

SEQ ID NO: 6689 - DNA, 82 bp, homo sapiens
ggaaaatttggaacttcctagagacttggagggctcagaagacagtaagatgtggaaaagtttggaacttcctagagacttg

SEQ ID NO: 6690 - DNA, 292 bp, homo sapiens
agtaagaacctgaagaagaaagaaagaaagaaagaaagaaagaaagagagagagagagagagagagagagagagagaaagaaagaaagagaaaggaagaaagaaagaaagagagagagagagagagaaagaaagagacaggaagaaagaaagaaagaaagaaagaaagaaagaaagaaagaaagaaagaaagaaagaaagaaagaaagaaagaaagaaaagggaagggaaggaggaaggaaggaaggaaagaaggaaggaaggaaagaaggaaggaaggaaagaaggaagga

SEQ ID NO: 6691 - DNA, 95 bp, homo sapiens
gctctcagcacagaggagaccctggagtgggtagctcctttccacagctagtagtcccaatgtttgctcggctctcagcagagaggagaccctgg

SEQ ID NO: 6692 - DNA, 128 bp, homo sapiens
ttatgttttatttagctatatttatttattccattgatagctcagcactaatatatattattttcttatatatattaatttcttacatatattaatttcttatatatatattaatttcttatatatat

SEQ ID NO: 6693 - DNA, 141 bp, homo sapiens
tctaccaaaaacacaaaaattatctgggtgtggtggcacacactggatcatgaggtcaggagttcaagaccagcctgaccaacatagtgaaacccctgtctaccaaaaacacaaaaattagctgggtgtggtggcacacac

SEQ ID NO: 6694 - DNA, 92 bp, homo sapiens
gtctagctaaaggtttgtaaatgcaccaatcagcactctgtaaaaacgcaccaatctgtactctgtgtctagctaaaggtttgtaaacgcac

SEQ ID NO: 6695 - DNA, 87 bp, homo sapiens
cagttcaatcccaaaaacttaaatgtgatgaaacttaaatgtgattcagaagcaataaatctcagttcaatctcaaaaacttaaatg

SEQ ID NO: 6696 - DNA, 146 bp, homo sapiens
ggaagaacttgtttctcttgcttaagagaaacaactcgtttatcaaaaaaaaaaaaaaacaagaggaagaacttgtttttcttgcttaagaggaagaacttgtttctcttgcttaagagaaacaacttgtttctcttgcttaagag

SEQ ID NO: 6697 - DNA, 115 bp, homo sapiens
tgcaaagaaagaaacgaactgctttgcaaaatgccttgaaggcccctgtgagagtcaagagtgaggctctctaggacttagtctgcaaagaaagaaatgaactgctttgcaaaat

SEQ ID NO: 6698 - DNA, 110 bp, homo sapiens
tttgttacatacgtatacatggaggtggagaatgttttttttaattatactttaagttttagggtacgtgtgcacaacatgcagttttgttacatatgtatacatggagg

SEQ ID NO: 6699 - DNA, 77 bp, homo sapiens
attaaataaatgtgtatgctttttctgaaagctctcatgtcacatagaacttacattaaataaatgtttatgctttt

SEQ ID NO: 6700 - DNA, 72 bp, homo sapiens
aggaaacaaaaggaagaattatgtatgcatggatataggaaacaaaaggaagaaacaaaaggaagaattatg

SEQ ID NO: 6701 - DNA, 118 bp, homo sapiens
gtaggaacagaaaactaaacactgcatgttctcgctttgcagggacatggacgaagctgtaagccattatcctcagcaaactaacgtaggaacagaaaactaaacactgcatgttctc

SEQ ID NO: 6702 - DNA, 75 bp, homo sapiens
tcttaagttccagcatccaatttttggatgaaagaggcattttctttgcctcttaagttccagcatccaattttt

SEQ ID NO: 6703 - DNA, 78 bp, homo sapiens
gggacttcagagtcaaacctggctactgagagctgtgctactttgagagcttgtgggacttcagagtcagacctggct

SEQ ID NO: 6704 - DNA, 146 bp, homo sapiens
taagtgagaacattcaaagtttgtctttccatgcctggcttatttcacttaatataatgacctccatttccatccacaaataagctcccacaaataagtgagaacattcaaagtttgtctttccgtgcctggcttatttcacttaa

SEQ ID NO: 6705 - DNA, 105 bp, homo sapiens
ataattttgttaaatatattttattaggttatatatgtgtcctatatataggtatatgttaacacatattttaatatacataattttgttaaatgtattttatta

SEQ ID NO: 6706 - DNA, 113 bp, homo sapiens
gaaagtaatttgtactttgtacaaatttgtacaaggtacagtttgtacaaataataatttgtacaaataatttgaaagtaatttgtactttgtacaaatttgtacaaagtaca

SEQ ID NO: 6707 - DNA, 82 bp, homo sapiens
gcttatttttataagccactgagtttgagctgattgttataacaataataagcttgctggcttattattataagccactgag

SEQ ID NO: 6708 - DNA, 125 bp, homo sapiens
tagctttagaatgacaatttggtgcaaaatttggattgcctcagctgacattttcagtctctcataggttcaataagtgactagctttagaatgacaatttggtgcaaaatttggattacctcag

SEQ ID NO: 6709 - DNA, 150 bp, homo sapiens
atatgtgattttcaggcaggcacttcctgcctgaaaatgtcctcttgaatgctagcagaaatagctgtgaatacattctccattcttgggcaggatagcatatgtgatttttaggcaggcacttcctgcctgaaaatgtcctcttgaatg

SEQ ID NO: 6710 - DNA, 114 bp, homo sapiens
gaaagtcatcccttgggtaatgatacataagaccctatcaaatgaaatagagttgaatcaaatgtcctctacagtatcataggaaagtcatcccttgggtaatgatacctaaga

SEQ ID NO: 6711 - DNA, 101 bp, homo sapiens
agaaccatgtaaaaatgtgactcaggcaactcacagataagcaaagacctccaggcagagcaccagaaagtcaatcaagaaccatgcaaaaatgtgactca

SEQ ID NO: 6712 - DNA, 102 bp, homo sapiens
ataatatataataacctatattatataggtaatatataggtaatatattatataggtaatatattatatatatgttatataatatataataacctatattat

SEQ ID NO: 6713 - DNA, 141 bp, homo sapiens
tggaggtcctccaagcattatttggagttgataatacttcagctacaaccaagcagaatctcttttttttggaggtcctcgaagcattatttggagttgataatacttcagcttcaatttggagttgataatatttcagct

SEQ ID NO: 6714 - DNA, 99 bp, homo sapiens
aaatgaaaagattatacagaacctagcttacaaaaacaaaatggtaaaaataaaaacaaaattttaaaaatacaaaatgaaaagattatacagaactta

SEQ ID NO: 6715 - DNA, 104 bp, homo sapiens
atttggttttatatgtggaatatgtaatatgttttttatgtggaatgtatatataaaacatatataaaaacatatataaaaatatgttttatatgtggaatgta

SEQ ID NO: 6716 - DNA, 91 bp, homo sapiens
attttttaaaaaggaaaactgctaccaggtattatgctaccaggtattatttgagagtattttttaaaaaggaaaactgctaccaggtatt

SEQ ID NO: 6717 - DNA, 76 bp, homo sapiens
ccaagaaccaatttaaaattattaccaccttattctacccaataaattaaaccaagaaccaatttaaaactattac

SEQ ID NO: 6718 - DNA, 117 bp, homo sapiens
tctttttcttgcctaattgctctagctaggatttccagtagtattttgaatagaagtgacaagagtgggttttcttgtcttttatatctttttcttgcctaattgctctagctagga

SEQ ID NO: 6719 - DNA, 121 bp, homo sapiens
aagcattgcctgatgtaaggtggggaaggtgaagagctcagggaggctagagaaagatgagatagagacagagagagagagagagaagcattgcctgatgtaagatggggaaggtgaagag

SEQ ID NO: 6720 - DNA, 87 bp, homo sapiens
gccttcctattccaaacttccccggcactccagaacatgtgttgaaaaacaggttttggtaaacgccttcctattccaaacttccca

SEQ ID NO: 6721 - DNA, 85 bp, homo sapiens
tgctaataattttctattgatgtatgattattattacagtattatattttattgtctgctaataattttctattgatgtatgatt

SEQ ID NO: 6722 - DNA, 76 bp, homo sapiens
ataactaaggggtagtaggattatttagtatatttatatttagtatatttatttatatttaggggtagtaggataa

SEQ ID NO: 6723 - DNA, 96 bp, homo sapiens
gctctcagcagagaggaggctctggagagggtagctcctctctgctactggttgtgcagacatctactgctctcagcagagaggaggccctggaga

SEQ ID NO: 6724 - DNA, 125 bp, homo sapiens
gaacataaattgtgaagatttcatggacatttattagttacccaaattaacacttttataatttcttacgcctgtctttactgcaatctctgaacataatttgtgaagatttcatggacatttat

SEQ ID NO: 6725 - DNA, 95 bp, homo sapiens
cccctgtgatatttttctaatattcaggggtcggaggatgatattactcccaaaatcgcagggggtgtacaacccctgtgatattgtttctaata

SEQ ID NO: 6726 - DNA, 426 bp, homo sapiens
ctgattggtgcatttacaaaccttgagctacacacaaaagttctccaagtccccactagattcgctagacacagagcactgattggtgcatttacaaaccctgagctagacacagagtgctgattggtgcattcacaatcccttaactagacataaaggttctccaagtccccaccagatcagctagacacagagcgcagattggtgcatttataaaccttgaactagacacagggtgctgattgatgtatttacaatcccttagctaaacataaaggttctccaagtcccccagatcagctagacacagagcgctgattggtgtatccataaaccctgagctagacacagggtgctgattggtgtgtttacaaaccttgagctagatacagagtgctgatcggtgtatttacactcccttagcta

SEQ ID NO: 6727 - DNA, 124 bp, homo sapiens
tgctcttgattctgtgtcaagctttcttgttatttatttttgagacagagtctcactcagtgcccaggctagagtgcagttttattgtgctcttgattctgtgtcaagctttcttgttatttat

SEQ ID NO: 6728 - DNA, 122 bp, homo sapiens
gagatcacgccactgcactccagcctgggcaacacagtgagagtcaggagaatggtgtgaacctgggaggtggagcttgcagtgagctgagatcacaccactgcactccagcctgggcaaca

SEQ ID NO: 6729 - DNA, 92 bp, homo sapiens
ggaaatcagagtgacaatagaaaaactttccatagagactggtaaattgatttccccatcttttaaggggaaatcagagtgacaatagaaca

SEQ ID NO: 6730 - DNA, 75 bp, homo sapiens
aatgtcatcagttaaggcagaaacaggccgttttcttttcttttgtggtggaatgtcatcagttaaggcaggaac

SEQ ID NO: 6731 - DNA, 84 bp, homo sapiens
tggaaccttgtgatcatgtgagttaataaactcctcagcttgcagatcccctattgtggaaccttgtgatcatgtgagataata

SEQ ID NO: 6732 - DNA, 103 bp, homo sapiens
aggtgggcatttggatataaattccagctaatttgttataatatgagaataatatgcactcatatttaaataaggtggtcatttggatataaattccagctaa

SEQ ID NO: 6733 - DNA, 102 bp, homo sapiens
aaaattttgctagtgggtcactaggagtgatggatctctaggccagaagaatgttatgtcatggaaacaggaagcaaaaattttgctagtggatcactagga

SEQ ID NO: 6734 - DNA, 124 bp, homo sapiens
atatggtttggatttgtgtccctgctcaagtctcaagaccttccagcaggacaagatgtggagatggaagacagtgatgttgacgattaatatggtttggatctgtgtccctgctcaagtctca

SEQ ID NO: 6735 - DNA, 97 bp, homo sapiens
cttcagcctctgattggtcactttccatgaccaatcagatgtttgcatagggtgcaactttgtaacttcacttcagcttctgattggtcactttcca

SEQ ID NO: 6736 - DNA, 91 bp, homo sapiens
aaatattccttgttcataaatagaatgaagaaggaatttgttcattctatttccttgttcataaatattccttgttcataatagaatgaac

SEQ ID NO: 6737 - DNA, 119 bp, homo sapiens
aatttagtcaagcagtgtctctatacttacatatgagaataaactctcaaaaaatccaaatccaaacctgggtgatttatttgttaatttagtcaagcagtgtctctatacttacatat

SEQ ID NO: 6738 - DNA, 62 bp, homo sapiens
aaaaaaaaacaaaaaacaaaacaaaacaaaaaaaaacaaagaaagaaaaagaaattaataga

SEQ ID NO: 6739 - DNA, 87 bp, homo sapiens
aattatgggagtacaattcaaggtgagatcccaccaagtccctcccacaacacgtgggaattatgggagtacaattcaagatgagat

SEQ ID NO: 6740 - DNA, 92 bp, homo sapiens
ccaaagtactgggattacaggcttgtctcaaactcctgacctcaggtgatctgcccacctcggccttccaaagtgctgggattacaggcttg

SEQ ID NO: 6741 - DNA, 96 bp, homo sapiens
aggcaggcagatcatgaggtcaggagtttgagaccagcctgaccaacacggtgaaaccccgtctctactaaggcaggcagatcacgaggtcaggag

SEQ ID NO: 6742 - DNA, 103 bp, homo sapiens
acttcttgaggacaggaactatacctgttttctctgctgtatattctgattttgaccttctttctaatagattataaacttcttgaggacaggaactgtacct

SEQ ID NO: 6743 - DNA, 147 bp, homo sapiens
agaaggtgctacccacttcaagttttctcagctcacctgcatgacctgcctgtggaaaggagctacccactctgggtctcctctccgctgagaactggactcttgtctggatgacctgcctgcagaaaggagctacccactttgggt

SEQ ID NO: 6744 - DNA, 87 bp, homo sapiens
atttatttatatttgttcagattaaaaaatgaaagaaaccaagaaaacctgaccttcaatttattcatatttgttcagattaaaaaa

SEQ ID NO: 6745 - DNA, 105 bp, homo sapiens
tatcttattttttattctttaaatttcctcagtgaagccaggcctggataataaacttcatgctcagtatatcatatcttattttttattatttaaatttcctca

SEQ ID NO: 6746 - DNA, 75 bp, homo sapiens
cccgttcaaaagtgggcaaaggacaagaaaaaaaaacgaaaacaattaatcccgttcaaaagtgggcaaaggaca

SEQ ID NO: 6747 - DNA, 102 bp, homo sapiens
gcatcataaataaaagccatgccatttatttaaagtggtatgttaaatcaatgttagaaaacacagcatcataaataaaagccatgccatttattaaaagtg

SEQ ID NO: 6748 - DNA, 98 bp, homo sapiens
ccccaattccttatttccatgccccaacctcttatctctgcaccccaaccccttatttctgcaccccaacctcttatatctctgtgccccaatccctt

SEQ ID NO: 6749 - DNA, 100 bp, homo sapiens
gtaagatccagcccctctgtaagatccagcccctctgtaagatctgtgagatctatggcaaatgttgccaataggtaagatccagcccctctgtaagatc

SEQ ID NO: 6750 - DNA, 85 bp, homo sapiens
tactaaaacctggtattgatttataatatctcaattatatatttctttaactcttctactaaatcctggtattgatttataatat

SEQ ID NO: 6751 - DNA, 81 bp, homo sapiens
ttgtgaagattaattgaaatgaaagtttgttgtgaagcttgttgccttataagtttattgtgaagattaattaaaatgaaa

SEQ ID NO: 6752 - DNA, 128 bp, homo sapiens
ccccattttgaactttttaaggagtgggttgggtcctatacaaacatctaccaacaatgacaataaaactttaacatctcaaaccccattttgaactttttaaggagtgggttgggtcatatacaaac

SEQ ID NO: 6753 - DNA, 139 bp, homo sapiens
tcccttagctagacacagagtgctgattggtgcgtttacagtcctgtagctagacacagagtgctgattggtgtgtttttacagggtgctgattggtgcatttacaatcctttagctagacacagagtgctgattggtg

SEQ ID NO: 6754 - DNA, 152 bp, homo sapiens
tccgtttttgacagagtgctgattggtgcatttacaaacctttagctagacacagagtgctgattggtgcatttacaatcctttagacacaaaagttcaccaagtccccacctgattagctagacacagagtgctgattggtccatttacaa

SEQ ID NO: 6755 - DNA, 75 bp, homo sapiens
gtggggatgtggagaacttttgtgtggacactgtgtatctagctagtctcgtggggaagtggagaacttttgtgt

SEQ ID NO: 6756 - DNA, 106 bp, homo sapiens
cagacagtggggcggccaggcagaggcgctccttacttccctatggcgcagtggccgggcagaggtgttcctcgcttctcagacagtggggcggccgggcagaggc

SEQ ID NO: 6757 - DNA, 88 bp, homo sapiens
aatgatttctaatcctttgtgtatacaccccatacatgtacatgtgtctttatcatagaatgatttctaatcctttgtgtatataccc

SEQ ID NO: 6758 - DNA, 99 bp, homo sapiens
cttatgataaaaatgtacacatacacattttagttatcatattttatgtttttaccaaccacttaagcagccttatgataaaaatgtacacacacacat

SEQ ID NO: 6759 - DNA, 98 bp, homo sapiens
ttaatctgtgtaggcttacatcagtttcccaatataggaacaatttaatttaggaacaattaaatttaatctgtgtaggcttacatctgtttcccaat

SEQ ID NO: 6760 - DNA, 123 bp, homo sapiens
agtaaagacaggcataagaaattataagagtattgatggggaagtgataaatgtccatgaaatcttcacaatttatgttcagaggttgcagtaaagacaggcataagaaattataaaagtatt

SEQ ID NO: 6761 - DNA, 61 bp, homo sapiens
gagtgaaatctacacagaagtaagctcggattacttgagagtggaatctacacagaaataa

SEQ ID NO: 6762 - DNA, 105 bp, homo sapiens
tctctgttctgttccattggtctgtttgtcaggtatgtcaaagatcagatggttgttgatgtgtggtgttgtttctgagttctctgttctgttccatttgtctgt

SEQ ID NO: 6763 - DNA, 125 bp, homo sapiens
catatatatctttatatcaatcaatgagtggatttttatccactcattgattgatagcatatattgattgatggtttatattgattgatagcatatatatctttatatcaatcaatgagtggatt

SEQ ID NO: 6764 - DNA, 94 bp, homo sapiens
taaattactattatcctgttgttctatttatcctagttatttatataaattactatattaccctattgttttaaattactattatcctattgtt

SEQ ID NO: 6765 - DNA, 122 bp, homo sapiens
agtattaattttgggaactgataaatgtccaggaaatcttcacaatttatgttcagacattgcagtaaagacaggcgtaagaaattataaaagtattaattttggaaactgataaatgtcca

SEQ ID NO: 6766 - DNA, 90 bp, homo sapiens
agaaatgtttatcctttttactctgtttaaatgagctttctctgaaaacagctttctcttcaattaagaaatgtttatcttttttactct

SEQ ID NO: 6767 - DNA, 308 bp, homo sapiens
accccaaccccttctctccttgtctctaccccttctctgcttttctaggggaggggcaagtacccctcaacccctctccttcacccttagcggcaagtcccgcttttctatggggcaagaacccccaatcccttatttccacgccccaacctcacatctctgcgccccaatcccttatttctgagccccaacctcttatatctctgcaccccaatcccttatttctgcaccccaacctcttacatctctgtgccccaatcccttatttctgtgccccaacctcttatttctgtgccccatcccttatt

SEQ ID NO: 6768 - DNA, 133 bp, homo sapiens
gggaactgataaatgtccatgaaatcttcacaatttatgttcagagattgcagtaaagacaggcataagaaattataaaagtattaatttggggaactgataaatgtccatgaaatctttacaatttatgttc

SEQ ID NO: 6769 - DNA, 79 bp, homo sapiens
tgaattttgccaataatttagtgacacattaacctagtatcccatgcaaacccagtgaattttggcaataatttagtga

SEQ ID NO: 6770 - DNA, 81 bp, homo sapiens
agaaaattttgactgtagcttaataaaatctagattaatgacaaaagtttccacagaaaattttgactgtagcttaataaa

SEQ ID NO: 6771 - DNA, 89 bp, homo sapiens
acaaccagcatttatacaattaaacttccgtttttgtcagacacattccacacagaatatatgttaacaaccagcatttatacacttaa

SEQ ID NO: 6772 - DNA, 101 bp, homo sapiens
aattttctcccattctgtaggtttaagttctttgtagattctggatattagcccattgtcagacgggtagattgtaagagttttctcccattctgtaggtt

SEQ ID NO: 6773 - DNA, 94 bp, homo sapiens
aaagatccaacagcccatcctctgctactttataattggtgagctattaacctcgatgagcatgcttttaaaggtccaacagcccatcctctgc

SEQ ID NO: 6774 - DNA, 83 bp, homo sapiens
caccatgcccagctaatttttgtatttttgtaattttagattacaggtgcctagcaccatgcccggctaatttttgtattttt

SEQ ID NO: 6775 - DNA, 83 bp, homo sapiens
tttcttttaaactgataatatcagaaaccaactatagaaacattactttgtatggttctgtttcttttaaactgataatatca

SEQ ID NO: 6776 - DNA, 97 bp, homo sapiens
tgagggagagtggggagggtggagagtggaaataagtggaaatgtctgaagatccagagagagaatgagagtgagggagagtggagagggtggagag

SEQ ID NO: 6777 - DNA, 114 bp, homo sapiens
ctctgtcgcccaggctggagtgcagtggcgtgatctcggctcactgcaagcttcgccttttttttttttttagacagagtctcgctctgtcgctcaggctggagtgcagtggcg

SEQ ID NO: 6778 - DNA, 106 bp, homo sapiens
gtcctggagcttgactttttggctttatgccctggctcggcctcttgttacaggctgaaagaatgagggtcctggagcttgactttttggctttatgccctggctc

SEQ ID NO: 6779 - DNA, 94 bp, homo sapiens
tgtctagctaaaggattgtaaatgcaccattcgcactctgtaaaaatgcaccaatcagcgctctgtgtctagctaaaggattgtgaatgcacca

SEQ ID NO: 6780 - DNA, 75 bp, homo sapiens
atcattggtatgggagggatacagactggactaactctgatggtctaactggatcattggtatgggagggatgca

SEQ ID NO: 6781 - DNA, 93 bp, homo sapiens
aaaagcagaaccactaataagggtctaacaaagatcacatgcttctgagggaacaggacaaagggcaaaagcagaaccactgataagggtcta

SEQ ID NO: 6782 - DNA, 75 bp, homo sapiens
tgaaagtctttccaaatacagtctttccagatacagtctttctttccaaatgaaagtctttccaactacagtctt

SEQ ID NO: 6783 - DNA, 100 bp, homo sapiens
tcttgcctttacataaaaatcaagattttgtttcactccaggaaaacttgccttttacataaaaatcttgcctttacataaaaatcaagatttggtttca

SEQ ID NO: 6784 - DNA, 123 bp, homo sapiens
taaaaatcaattgactgtatatacataagtttcaattagtttcatacaacataagtttcaggcaacctcaatcaattgactgtaatatacataaaaatcaattgactgtatatacatgagttt

SEQ ID NO: 6785 - DNA, 111 bp, homo sapiens
aaaaaaaaaaaggaagaaagaaaaagaagttccagaggcctgcttcttgatgcatagataatgaagagaaaaaaaaaaaaggaagaaagaaaaagaagttccagaggcctg

SEQ ID NO: 6786 - DNA, 139 bp, homo sapiens
aattttgtatttttagtagagatggggtttctccatgttggtcagtctgatcttgatctcccaacctcaggtgatctgcctgccttggcctcccaaaaaattttgtatttttagtagagatggggtttcgccatgttgg

SEQ ID NO: 6787 - DNA, 98 bp, homo sapiens
ggtaagttcccttttgttatctgaatactctgttctaacagaagattgggaagattctgttaatataggtaagttcccttttgttatctgaatactct

SEQ ID NO: 6788 - DNA, 139 bp, homo sapiens
catatcatttttctggatcctctgattaagcatgtcagatttttttaattttattatttttctggatcctctgatttttttattttattatttttctggatcctccaattatttattatttttctggatcctccgattt

SEQ ID NO: 6789 - DNA, 98 bp, homo sapiens
ctgccaccaccaggactaaaatgtgagtgaaacacaggctgcaccaccaggactgaaacacaagccaagtatggtctgccaccaccagggctaaaatg

SEQ ID NO: 6790 - DNA, 107 bp, homo sapiens
gaccagcctggccaacatggtgaaacctcatctctactaaaaaaaataataataaaataaaataaaatcagccgggcatgaccagcctggccaacatggtgaaacct

SEQ ID NO: 6791 - DNA, 96 bp, homo sapiens
acctttgtaaaatacagaagccttgtaaaatattagtagtattaactgtatactgacaatcaacacctttgtaaaatatagaagccttgtaaaata

SEQ ID NO: 6792 - DNA, 90 bp, homo sapiens
tgttccttttaatagtcccaaatcactaccccctcagacacccccaaaacaaacaaacaaaaagtgttctttttaatagtcccaaatcac

SEQ ID NO: 6793 - DNA, 87 bp, homo sapiens
agagggacacattttactaagcacttcatagccactagcatagttataatgaaaaagacaataaaaagggacacattttactaagca

SEQ ID NO: 6794 - DNA, 114 bp, homo sapiens
tttcctcctagaccacaaagaggactgaggaagttcggatttagtggcccttactgatgcattcttgaaaacctgcacccttgcctttcctcttagaccacaaagaggactgag

SEQ ID NO: 6795 - DNA, 112 bp, homo sapiens
tctttctgtcctcagcaaaatgcacacaattttagaggttcacagaccttctcatcttttagacctttttgaggttctttctgtcctcagaaaaatgcacacaattttagag

SEQ ID NO: 6796 - DNA, 82 bp, homo sapiens
acaaaaaaaaagtgacacatatacatttatatcctttatatcaataatcatttaaaaatacaaaaaaagtgacacatataca

SEQ ID NO: 6797 - DNA, 114 bp, homo sapiens
ctaattttaatatattgtagttattgctttaattgtaatatattgtagtatattgtaattgtaatatattgtagttattgctaattgtaatatattgtagttattgctttaatt

SEQ ID NO: 6798 - DNA, 108 bp, homo sapiens
caccaatcggcactctgtatctagctcaaggtttgtaaatacaccaatcagcaccctgtgtttagctcaaggtttgtgaatgcaccaatcgacactctgtatctagct

SEQ ID NO: 6799 - DNA, 82 bp, homo sapiens
atgtgcaaggaagattggaggaaaaacttttccttaggaaaatcaatttagcaatcatgtgcaaggaatattggaggaaaaa

SEQ ID NO: 6800 - DNA, 78 bp, homo sapiens
tggagatgtgttttctctttgatccattctctgatcataaaggaaactgggaatatggaaatgtgttttctctttgat

SEQ ID NO: 6801 - DNA, 95 bp, homo sapiens
acagagaacaaattattgactaacctagtattgtttacagagaacaaattattgactaacctagtattgtttacagagaacaaattattgactaa

SEQ ID NO: 6802 - DNA, 86 bp, homo sapiens
ctagttctttcaaggtccttaaaattatcttcatagaatgtctctgttctcttaaagactctagttctttcaaggtccttaaaatt

SEQ ID NO: 6803 - DNA, 80 bp, homo sapiens
ccagcttcggacaggaagactaaggattaatgtgtggcagtctcagagaacagcccagcttcggacaggaagactaagga

SEQ ID NO: 6804 - DNA, 101 bp, homo sapiens
ctgataactttcccatggagcaagtttttcccatggagcaagctttcccatggagcaagcttttggtagcattctacctgataactttcccatggagcaag

SEQ ID NO: 6805 - DNA, 108 bp, homo sapiens
ttatatggaactatatagaattatgggtatactaatacttagcatgggataatttatatggaattttatagaatatatggaactatatagaattatatgaaactatat

SEQ ID NO: 6806 - DNA, 98 bp, homo sapiens
ggggcaaaaacctgtaagaaaatacctcaaaatactaactacaactaagaaaaagtacataggccggggcaaaaacctgtaagaaaatacctcaaaat

SEQ ID NO: 6807 - DNA, 80 bp, homo sapiens
ttactcagaaaaagacaaatgataaaaaaagataaaatattttataattttataaaattactcagaaaaaaacaaatgat

SEQ ID NO: 6808 - DNA, 91 bp, homo sapiens
tttacaatcctttagctggacacagagcactgattggtgcgtttttacagagtgctgattggtgcatttacaatcctttagctagacacag

SEQ ID NO: 6809 - DNA, 80 bp, homo sapiens
caagtctctaggaagttccaaactttcccacatctttctgtcttctgagccctccaagtctctaggaagttccaaaattt

SEQ ID NO: 6810 - DNA, 89 bp, homo sapiens
cctcaaatacctgggaccttgtgggctccggatcaattgttctgttaattgtcaccaccagcctcaaatacctgggaccttgtgggctc

SEQ ID NO: 6811 - DNA, 100 bp, homo sapiens
cagcctggccaacatggtgaaaccccatctctactaaaaatacaaaaattaaccagcctgagtagctgggattacagcctggccaatatggtgaaacccc

SEQ ID NO: 6812 - DNA, 97 bp, homo sapiens
ggagggggcttctgattggctgaggtttccctgcttcttctcgatatccctatcacccattcaaattctagaggaaggggcttctgattggctgagg

SEQ ID NO: 6813 - DNA, 107 bp, homo sapiens
atggccatggcttgattttgtaagtaaaattctactgaactccccagagtagagtaggaagggacatgggacaaacatggccatggcttgattttgtaagtaaaatt

SEQ ID NO: 6814 - DNA, 71 bp, homo sapiens
caattttacttaaatatcaaaccagacatttgatttgaagcttacttgcaattttacttaaaatatcaaac

SEQ ID NO: 6815 - DNA, 97 bp, homo sapiens
accaattctccagctttctagacaccagctgggtgtctagaaacaaccaattgtctagaacaaccaattctccagctttctagacaccagctgggtg

SEQ ID NO: 6816 - DNA, 85 bp, homo sapiens
aaaagccaacagtgttaattggagatagagagataggaattcttgaggaggctgtgaaaagccaacagtgttaattggagataga

SEQ ID NO: 6817 - DNA, 119 bp, homo sapiens
tgaaatttatatcagatcacagttttgtggataaccaaaatccttgtacatattcataagaactctttgacaaccacacattcaacgtgaaatttatatcagatcacagttttgtggat

SEQ ID NO: 6818 - DNA, 153 bp, homo sapiens
ccctgacatttctttctccccatttctgtgggcaaggaacacggcccccaggcaactctgggttccagaaatgaaggcctccttgagaagccacattagccctgacatttctttctccccatttctgtgggcaaggaacacggcccccaggca

SEQ ID NO: 6819 - DNA, 113 bp, homo sapiens
actgatgggacatgggaggactgcacccagctgattcctcacggtggtcctgaacccattctgtgatgttgactgatgggacatgggaggactgcacccagctgattcctcac

SEQ ID NO: 6820 - DNA, 110 bp, homo sapiens
gtgaagttaggatttggacccaggcaccacagctggagtctgcgttctgtttgctgtatagactctctatcccctgggcttaagtgaagttaggatttggacccaggcac

SEQ ID NO: 6821 - DNA, 89 bp, homo sapiens
tcaggaattaaaagttagctgggtgatttttgctcagaggatctcataaagctgcagtcaaagatcaggaattaaaaattagctgggtg

SEQ ID NO: 6822 - DNA, 131 bp, homo sapiens
ttgtttgagataaatccctaacagaaactttttttttttaaaaaggattgggatttgtcttttctcctccatgtagaatcaccacacaaagtttgtttgagataaatccctaagagaaacttttttttttt

SEQ ID NO: 6823 - DNA, 95 bp, homo sapiens
ggttagctcctatctgcaggcaggtcatcccaatgaaggtgaaaccctcagcagagagaagacctgcagtaggtagctcctatctgcaggcaggt

SEQ ID NO: 6824 - DNA, 155 bp, homo sapiens
tatgtctagctaagggattgtaaatgcaccaatcagcatcctgtgtctagctcaaggtttgtaaatgcaccaatcagtgctctgtgtctagctaatctagtggggtcttggagaacttttgtgtctagctcaaggtttgtaaatgcaccaatcag

SEQ ID NO: 6825 - DNA, 97 bp, homo sapiens
tgatttttgcaccgtagattagttttgccaattacagaactttatatatggaattaggcatcatagtttagtgatttttgcaccatagattagtttt

SEQ ID NO: 6826 - DNA, 72 bp, homo sapiens
ttcttaggaagaaataaaacatatttattatttattatttattatttatttcttaggaaaaaataaaacata

SEQ ID NO: 6827 - DNA, 109 bp, homo sapiens
gaggtaaaacatataaaacattaaaacaaaaaggccccctctgaatagagctaagacagaggacacagtccctggcctcaaagaggtaaaacttataaaacattaaaac

SEQ ID NO: 6828 - DNA, 125 bp, homo sapiens
gcaactattccgatcagcagggtccagggaccgttgcgggttcttgggcaagaggtgtttctgctgcttcatcggtgagtgcaactattccgatcagcagggtccagggactgttgcgggttctt

SEQ ID NO: 6829 - DNA, 99 bp, homo sapiens
agaggctgaaaattttccaaaactgatcagtactgatcaatagagtgggggagaagtgatgtatgaagagacagaggctgaaaaatttccaaaactgat

SEQ ID NO: 6830 - DNA, 99 bp, homo sapiens
attttgcctagattaaacaaactcaaagaattgcaccttaaaagggttaattttgtattatatgaattttgcctcgattaaacaaactcaaagaattgc

SEQ ID NO: 6831 - DNA, 114 bp, homo sapiens
cctcagcctccagaatagctgggactattcacaggtgggatcacagaacactatagcctgaaactcctgggctcaagcaacctcctgcctctgcctccagaatagctgggacta

SEQ ID NO: 6832 - DNA, 104 bp, homo sapiens
atcagcagggtccagggaccgttgcaggttctcgggcaagaggtatttctgctgctgcgtcagtgagcgcaactattttcatcagcagggtccagggaccgttg

SEQ ID NO: 6833 - DNA, 155 bp, homo sapiens
tctgtctagctaaaagattgtaaacgcaccaatcagcactgtgtctagctaaaggtttgtaaacgcaccagtcagcgctctgtgtctagctaatcaggtaggggacttggagaacttttgtgtctagctaaaggtttgtaaacgcaccaatcagc

SEQ ID NO: 6834 - DNA, 102 bp, homo sapiens
atttcctctactccctcttttcatgtttatcttatgtaaaatgtagatttactgagagggagataatacataattgactttttcctctactccctcttttca

SEQ ID NO: 6835 - DNA, 76 bp, homo sapiens
tttatctgcagtcacagagcagggtaaaacaaaaaagcttctctgctccaaatttatgtgcagtcacagagcaggg

SEQ ID NO: 6836 - DNA, 102 bp, homo sapiens
tcaataacaacagaataataatagcattgtagccaagagtatgagcctacatgtcagcttgcctggcacagcacatcaataacaacagaataataagagcat

SEQ ID NO: 6837 - DNA, 89 bp, homo sapiens
gcctgggtcacatgcccagtcccccaccaattactatggtcagagatggtgcagaactctgaccaagcctgggtcacatgcccattccc

SEQ ID NO: 6838 - DNA, 90 bp, homo sapiens
ggggtttcaccatgttggccaggctggtcttcagctaatttttgtatttttgtagagacggggtttcaccatgttggccaggctggtctt

SEQ ID NO: 6839 - DNA, 107 bp, homo sapiens
ttgagccagataccacactccaataatgatataatccttagtacttgataaatgttccttaagaaaaacttgagcctgataccacactccaataatgatataatcct

SEQ ID NO: 6840 - DNA, 90 bp, homo sapiens
ggttgatttatatatgtaaattatatctcattaaaaaccactgatttatacactttaaacggtttatttatatatgtaaattatatctca

SEQ ID NO: 6841 - DNA, 89 bp, homo sapiens
cccatctctactaaaaatacaaaaacattcattctgtcacccaggcttaagtgcagtgacaaatcccatctctactaaaaatacaaaaa

SEQ ID NO: 6842 - DNA, 91 bp, homo sapiens
aataatgggacacaacaacattaatcacattagtgtcccattattggtgatttcagatttcattatttaattatgggacacaacaacatta

SEQ ID NO: 6843 - DNA, 107 bp, homo sapiens
aattttaaacaaattggttacagtatgcaacagaggctccatctaaaaaaaaaagtaactaaaaatagtatgtatgcaacttaagtttaaacaaattggttacagta

SEQ ID NO: 6844 - DNA, 110 bp, homo sapiens
gagttcgagaccagcctggccaacatggagaaaccccatctctactaaaaatacaaaaattagccaggcttatcacgaggtcaggagttcaagaccagcctggccaacat

SEQ ID NO: 6845 - DNA, 156 bp, homo sapiens
ccagattagctagatacagagtgtggacacaaaggttctccaagtccccaccagagtagctagatacagagtgtcgattggtgcattcacaaacccagagctagacacagggtgctgattggtgtgtttacaaaccttgagctagatacagagtgc

SEQ ID NO: 6846 - DNA, 105 bp, homo sapiens
gccaccacacctggctaatttttttgtattttatgtatttttttttttttgtatgtggtggctaaaaaattagccaccacacctggctaatttttttgtatttta

SEQ ID NO: 6847 - DNA, 117 bp, homo sapiens
ccaaacagttctaccatgtgcatattatagatggggaaaccgaggctaggagagctatggtgccttctcatttattccaccaaacagttctaccatgtgcatattacagatggggaa

SEQ ID NO: 6848 - DNA, 78 bp, homo sapiens
agaaaagaaaatctcattttctcaaaaaaaaaaaaaaagaaagaaagaaagaaaagaaaagaaaatctcattttctga

SEQ ID NO: 6849 - DNA, 85 bp, homo sapiens
ttcccagtccctctgaggccagccatacggggacccaggtaatgcaattaccaggcgttcccagttcctctgaggccagccatac

SEQ ID NO: 6850 - DNA, 113 bp, homo sapiens
gaactggggtcaaagaccaaatactagaataaaagatatgcgtatcacccagaaatttccaagaaattaggaactctgtgtcaagaactggggtcaaagatcaaatactagaa

SEQ ID NO: 6851 - DNA, 95 bp, homo sapiens
atcatattcatgtcatcattatctatttacctatccatctctctctctatccatcctctctctctttccatcatatccatgtcatcattatctat

SEQ ID NO: 6852 - DNA, 91 bp, homo sapiens
gtttcgaccagtagagtctaatagagtatggcagaaattatattgtgtaacttctaaggttttgaccagtagagtctaatagagtatggca

SEQ ID NO: 6853 - DNA, 92 bp, homo sapiens
agtgtgttgtgtttgagaataaaatagcaaaatgtagcaaaatgtgatttctgctacaaagagaatagtgtgttgtgtttgagaataaaata

SEQ ID NO: 6854 - DNA, 132 bp, homo sapiens
taaagggaagatgaagaagaaaagaaaaggcgaaagaagacaaaggacccaagagaggaaaccaattttatacaaagagaaataaagggaagatgaagaagaaaagaaaaggcgaaagaagacaaaggaccc

SEQ ID NO: 6855 - DNA, 104 bp, homo sapiens
ttaaccccttgcttaaaaaagaaagaaaagaaaagaggagaggggaggggaggggaggggagaccaaaattcagccaaaattaactccttgcttaaaaaagaaa

SEQ ID NO: 6856 - DNA, 115 bp, homo sapiens
tttttaaaagaatattaacatgaacaaaaaaaaatgcgaagtatggccagcgagttaagaatgttttttctttaaaggctttttttaaaagaatattaacatgaacaaaaaaaaa

SEQ ID NO: 6857 - DNA, 95 bp, homo sapiens
ggttgcaaaagtgagtctctcctcgcttctaccgatctcattttccacgcacttacaaacggaccagtggttgcaaaagtgagtctctcctcgct

SEQ ID NO: 6858 - DNA, 72 bp, homo sapiens
catgtgtaaaatggaaaaaaacaaacacacaaaaacaaatacccccatgtgtaaaatggaaaaaaaaaacac

SEQ ID NO: 6859 - DNA, 117 bp, homo sapiens
cccacctcagcctcccgaagtgctgggattacatgtgtgagccaccacacccagcctgcttcaaactcctgacctcaagtgatctgcccacctcagcctcccaaagtgctgggatta

SEQ ID NO: 6860 - DNA, 113 bp, homo sapiens
tggatcccactgctggcttcttagaactgtacagcaaagcctgtggggggataattcccatttcagccgcatccaccttaaacatggatcccactgctggcgtcttagaactg

SEQ ID NO: 6861 - DNA, 97 bp, homo sapiens
agagatggggtcttgctgtgttgtagctgggaacacaggtgcacatgactctgcctggttaatttttaaattgcagagatgaggtcttgctgtgttg

SEQ ID NO: 6862 - DNA, 106 bp, homo sapiens
atcatcgtggattcgggtgagtcctaaatccaatgacaaatatcctaaatccaatgacaaatatccaaatcatcctggattcgggtgagtcctaaatccaatgaca

SEQ ID NO: 6863 - DNA, 169 bp, homo sapiens
agctagatacagagtgtcgactgctgcactcacaaaccctgagctaaacacagggtgctgattggtgtgtttacaaaccttgagctagatacagagtgcccattggtgtatttacaatctctgagctaaggccccaccagagcagctagatacagagtgtccattggtg

SEQ ID NO: 6864 - DNA, 117 bp, homo sapiens
taaatcaaccaaccaataaaagagcagattcttcgcaaactctgtgctccagctggggtgtcagagcgagatcctgtctcagtaaatcaaccaaccaataaaagagtagattcttcg

SEQ ID NO: 6865 - DNA, 81 bp, homo sapiens
cctctcaagacctctcctcaaacagtcagtttagatgggacatagaaacggagctgcctctcaagacctcccctcaaacag

SEQ ID NO: 6866 - DNA, 81 bp, homo sapiens
tgcagatttcctgggcttggagtctaggagcataacgtcgagctttaatcaccaagttgcagatttcctgggcttgcagtc

SEQ ID NO: 6867 - DNA, 137 bp, homo sapiens
ggaggtctattagaacaaagtaacaaagaaactccctctccaggggcattcttcactataaaccaggtgagtagaaaaaaatgaaactatctgggaggtctactagaacaaagtaacaaagaaactccctctccagg

SEQ ID NO: 6868 - DNA, 114 bp, homo sapiens
attatctttattctccagtatggttaaagactcaaaatggcatgtaatcattaactcaaaactgatcagaggtagtgactgttaattatctttactctccagtatggttaaaga

SEQ ID NO: 6869 - DNA, 100 bp, homo sapiens
acattacatttttaacaaaatcacaatatatgtttataatacagggtgtattccaaatttatataatgtgtatatacacattatatttttaacaaaatca

SEQ ID NO: 6870 - DNA, 113 bp, homo sapiens
gacttggagaatctttatgtctagctaagggattgtaaacacaccaatctgcactctgtatctagttattctggtggcgacttggagaacctttatgtctagctaagggattg

SEQ ID NO: 6871 - DNA, 129 bp, homo sapiens
gccttggcctcccaaagtgctgggattacaggcgtgagccaccgtgcccggccggtctcgaactcttgacctcaggtgatccgcctgccttggcctcccaaagtgctgggattacaggtgtgagccacc

SEQ ID NO: 6872 - DNA, 173 bp, homo sapiens
gcctcagcctctggagtagctgggattataggcatgcaccaccacactaatttttgtaattttagtagagatgaggtttcaccatgttggcaaggctggtctcaaactcctgacctcaggtgatctgcccactttggcctcccaaagtgtcgggattacaggtgcgagccact

SEQ ID NO: 6873 - DNA, 108 bp, homo sapiens
tttctgtttctgccataacaaatgacgtgatttgtttttaattaaagagctagcagagagtacagattggatagtatatttgtttctgtttctgccataacaaatgac

SEQ ID NO: 6874 - DNA, 104 bp, homo sapiens
ggaggggcgcgccctggagttgggggcgggcgaggcgtttgcgggcgcggggggcgggtttggaggtgtgcgggggaggggcgtgccctggagttgggggcggg

SEQ ID NO: 6875 - DNA, 90 bp, homo sapiens
agttattatgacgctgcaacagagaccctttgcagagaaggccaggagacaatagataaaagttattatgacactgcaacagagaccctt

SEQ ID NO: 6876 - DNA, 157 bp, homo sapiens
ccccaccagattagctagatacagagtgtggacacaaaggttctccaaggccccaccagagtagctagatacagaatgtcgattggtgcattcacaaaccctgagctagacacagggtgctgattggtgtgttcacaaaccttgagctagatacaga

SEQ ID NO: 6877 - DNA, 125 bp, homo sapiens
ccacctgccttggcctcccaaagtgctgggattacaggtgtgagccactactcctggcctggtctccaactcttgacctcaaatgagccacctgccttagcctcccaaagtgctgggattacagg

SEQ ID NO: 6878 - DNA, 80 bp, homo sapiens
cctgggctcaaacgatcctcctgcctctgcccagcaaagtgttgggattacaggcctgggctcaaacgatcctcctgcct

SEQ ID NO: 6879 - DNA, 90 bp, homo sapiens
agaccacttggggagaggagagagagaacattctggaatgttctgagaatcattccagaattactgcagaccacttggggagaggagaga

SEQ ID NO: 6880 - DNA, 103 bp, homo sapiens
ttttttttaattcataaatgtgccactgcactccagcctgggtaactggagtgagaccctgtctccaaaaaaaaaaaaatttttttttaattcataaatgtac

SEQ ID NO: 6881 - DNA, 95 bp, homo sapiens
gccacacatctgttcaccccacagaaccgtggggctgagccatgtggggactccacgtggggtcccagccacacatccgttcaccccacagaacc

SEQ ID NO: 6882 - DNA, 108 bp, homo sapiens
gaggccaggagttcaagactagcctgggtaacactgcttgtaagcccagcgttttgggaggccgaggtgggcagatcacttgaggccaggagttcaagaccagcctgg

SEQ ID NO: 6883 - DNA, 89 bp, homo sapiens
agaaaccgggacaacaaacacaaaactcacaccaaaaaccacagatgaatacagcctgggcagacagaaaccgggacaacaaacaaaac

SEQ ID NO: 6884 - DNA, 84 bp, homo sapiens
tgagaaaaacaaaaacaaaaacaaaaaaacctttgctctaaaaaaaaagcatcagttcctaggagagaaaaacaaaaacaaaaa

SEQ ID NO: 6885 - DNA, 84 bp, homo sapiens
ccctgttcctcctcctcccggcgcctgtccacatctgcgctgactcccactcgggacccctgtccctcctcctcccggcgcctg

SEQ ID NO: 6886 - DNA, 84 bp, homo sapiens
tcccaggatggccttccgggacctctctacttcacactgtctgcccagatcccgcctcccaggatggccttcccggacctctct

SEQ ID NO: 6887 - DNA, 94 bp, homo sapiens
taccatgtgcagggtatagctgctagctgagaaggggagctaacagctatattaaacatttaccatgtgcaggtatagctgctagctgagaagg

SEQ ID NO: 6888 - DNA, 184 bp, homo sapiens
gcgcaggcgcagagcggaggccgaggtggcggtgacgcagggcccagcgctccctgaagggtcaaagctcaatccgagcgcaggcgcagagcggaggccgaggtggccgcggggcggggcagaagggctcctgtggggcccagatagtttcctcgcgcaggtgcagaagccaggctgcggtgct

SEQ ID NO: 6889 - DNA, 99 bp, homo sapiens
gatgagattaacatttgaattgttagactgagtaaagatgattggcatgtgtgtatgtgaaggtatttcttgatgagattaacatttgaattggtagac

SEQ ID NO: 6890 - DNA, 86 bp, homo sapiens
aggcagaaaggggacttttcttttaaagggaggagaaaacaaggctagaaaaaaaaaggctaggcagaaagggggcttttctttta

SEQ ID NO: 6891 - DNA, 93 bp, homo sapiens
acatagattttgattggccacagcccactcccagtacatagattgtgattggccacagcccagccacagtacatagattgtgattggccacag

SEQ ID NO: 6892 - DNA, 83 bp, homo sapiens
tgtatctggcaaatattctttgaaattaattttacatttttgaaattttgcatacttgtatctggcaaatattccttgaaatt

SEQ ID NO: 6893 - DNA, 80 bp, homo sapiens
aacaagcaaataaaatgccaaggcacctaagtcaactcttttccaaaacaatcatcaaacaagcaaacaaaatgccaagg

SEQ ID NO: 6894 - DNA, 82 bp, homo sapiens
atgagacctagggggctatcaggtggcatatttttgttattattcttatcttttttatgagacctaggggactatcaggtgg

SEQ ID NO: 6895 - DNA, 93 bp, homo sapiens
tttgtcttaggggaaagtcccctttgattggttgaagtttccatcccttagctttcagctatgactcattttggcttaggggaaagtcccctt

SEQ ID NO: 6896 - DNA, 159 bp, homo sapiens
cggctcatcctcagcaacctcacagtctgttggcaagacagcttaagacagaaagttatagtactacacaacatgtgtgatgcaattacttgcactatgctcagtgtcggctcatcctcagcaacctcacagtctgttggcaagacagcttaagacaga

SEQ ID NO: 6897 - DNA, 80 bp, homo sapiens
tcaactggaaaaacaataccccatcccatcaacccttcacctctgccgatctcctcaattggaaaaacaataccccatcc

SEQ ID NO: 6898 - DNA, 87 bp, homo sapiens
gagagaggcccttctgatgtctggctcaggcaaagggggagcgggcacgtcggatagtgagagaggcccttctgaggtctggctcag

SEQ ID NO: 6899 - DNA, 107 bp, homo sapiens
gcctccagagctactggtcagaacccaggcagatgacacttcatgaagcctcacggaggtcaagagcgtccatgcctccagagcttctggtcagaacccaggcagat

SEQ ID NO: 6900 - DNA, 73 bp, homo sapiens
gaggtccctctctccttgctggctatgtcacccaggccacccactctcagagatccctctctccttgctggct

SEQ ID NO: 6901 - DNA, 85 bp, homo sapiens
tacctagatgaggtattcataagtgtctgttaagtgtacttagtacctaggtacctaagttcctagatgaggtattcataagtgt

SEQ ID NO: 6902 - DNA, 92 bp, homo sapiens
tatactcatgaaatttcagaactaaagtaattttacatattaattaaaattaactaaacgaatttaacatatcctcatgaaatttcagaact

SEQ ID NO: 6903 - DNA, 86 bp, homo sapiens
gtcctgcagagttccctagaggggctcgacgaggcacaggggtggattctgaggcctgtcctgcagaattccctagaggggctcga

SEQ ID NO: 6904 - DNA, 141 bp, homo sapiens
gaagctctgtggcaccagttgatggcagggtctaagctttgcagcgctaggcggtggcagggatctaagctctgcagtgcagtcggcggcagagattgaagctctgtggcaccagttgatggcaggggtctaagctttgca

SEQ ID NO: 6905 - DNA, 97 bp, homo sapiens
tctccggctactgtttgacaggcatgaatgcgggcggagctccatctaaagggccacgtatgtttcatctccggctactgtttgacatgcatgaatg

SEQ ID NO: 6906 - DNA, 179 bp, homo sapiens
cttgagggttcttaacgttcccccttcaatcagttacctccaacacatactctgagcagggaggcaattcacctgacctcatctgtcccccacttcagtcggttacctccaatacataccctgagtggggaggcaattcacctgacctcatctgtcccccatcagtcagttacctccaa

SEQ ID NO: 6907 - DNA, 131 bp, homo sapiens
agggaaaaggcaaaggatgcccttggagagctggaattcgatctcttggacgcatgaggtgctctgtcccctctaccaggcaccagggagaaggcaaaggatgcccttggagagctggaattcgatctctt

SEQ ID NO: 6908 - DNA, 88 bp, homo sapiens
ccatgcatcttgtaggcactctccccggctccatgcctccctgcagaaggctttgtatggcccatgcatcttgtaggcacctctcccc

SEQ ID NO: 6909 - DNA, 88 bp, homo sapiens
gtcccctccacatctcatgttgaaaagctaaagcttctggtttcccaggagcagcagggcgtcgtcccctccacatctcatgttgaaa

SEQ ID NO: 6910 - DNA, 114 bp, homo sapiens
gggggaaaatgggaagcctgctcctcccagtccctcccgttctgggggaaaatgggaagcctgctcctcccggtccctcccgttctgggggaaaatgggaagtctgctcctccc

SEQ ID NO: 6911 - DNA, 83 bp, homo sapiens
gccaagggatgcatctcctttcctagacagacagcctcgtccgccctcccttcccccactgccaagggatgcatctcctttcc

SEQ ID NO: 6912 - DNA, 107 bp, homo sapiens
gatgcaccccccacagtggcgtggcgtaaacaaccagaggctcaaccctcctctcccatggtgaccgtcccatgctgcgcgatgcaccccccacagtggcgtggcgt

SEQ ID NO: 6913 - DNA, 136 bp, homo sapiens
tttccttgcctgtgtggagtgtactgatgaacacagagaaggaatgttttatctgtaatctacctttttttagtgatagcatttccatttccttgcctgtgtggagtgtactgatgaacccagagaaggaatgttt

SEQ ID NO: 6914 - DNA, 88 bp, homo sapiens
gcagggaagtggcgggaggcttgggggtttgtcctggcttctgtacccctcagcgcccaaggcagggaagtggcgggaggctcggggg

SEQ ID NO: 6915 - DNA, 91 bp, homo sapiens
gcagtcgggtttgttatccgagtccccctgcgaggagaaggcgccgatgacctagggttccttcgcagtcgggtttgttatccgagtcccc

SEQ ID NO: 6916 - DNA, 93 bp, homo sapiens
ggggcggtagccagctcttccctagcactactttgtgcggggactgggagggtcgtggcctcaggccggggcggtaaccagctcttccctagc

SEQ ID NO: 6917 - DNA, 95 bp, homo sapiens
gccacggtgggggtgtggtcagggtgtggtcaagctgtaggggaggggcgggctcgatctgcgggaacgagaggtgtggtcaaggtgtggtcaag

SEQ ID NO: 6918 - DNA, 142 bp, homo sapiens
cgaaggtctgcagcttcactcctgagccagcgagaccacgagcccactgggaagaatgaacaactccagacgcactgccttaagagctgtaacactcaccgcgaaggtctgcagcttcactcctgagccagtgagaccacga

SEQ ID NO: 6919 - DNA, 221 bp, homo sapiens
ggaaaatgctccagcctgattggctggtgctccgttgcgattggctcatgctccattccgactggaaaatgctccagcctgactggcctgtgcttcattgtgattggttcatgctccatcctaattggctcatcatctcataatccattctcattgatctatgctccatccttattggaaaatgcttcatcttgattggcccatgctccagtctgtgtggt

SEQ ID NO: 6920 - DNA, 105 bp, homo sapiens
cccccagagatgcaggtggacgtgggagtcagcacagaccccaggggtaactatgcctggagaccacccccagagatgcaggtgggcgtgggagtcagcacagac

SEQ ID NO: 6921 - DNA, 110 bp, homo sapiens
gtgtcggtaagggccactaaatccagtttttttcagtcctctttgtggtctaagaggaaaggcaaaggtgcaggtttttgagaacgtgtcagtaagggccactaaatcca

SEQ ID NO: 6922 - DNA, 128 bp, homo sapiens
agctttttttcatatgtttgtttggccacatgtatatttcctacggaaaaacaaggataaaagttatacagtacttctcacagaaattatgcaagctttttttcatatgtttgttggccacatgtatg

SEQ ID NO: 6923 - DNA, 94 bp, homo sapiens
ggactgggcctaaccacaaggggccattttctcctccagagaacaccgtgtagcctggaggtgtttatggactgggcctaaccacagggggcca

SEQ ID NO: 6924 - DNA, 108 bp, homo sapiens
ctgcccggacacggctctgacgtgggctgagtccacacgtggtgtgtggggttccatccagcctgcacccaactgcccggaaacggctctgacgtgggctgagtccac

SEQ ID NO: 6925 - DNA, 98 bp, homo sapiens
gagaagtgaagacgtcaactacagtccagatgctcctcgacttacagtggggcagggctgcaatgagaagtgaagacgtcaactacaatccagatgct

SEQ ID NO: 6926 - DNA, 236 bp, homo sapiens
atggtgcatggaccaatcagaattgaccacagaccacacagactggagcaggggccaatcaagatgaaagatttgccaatcaggatggagcatacctcagtgagaatggatcaggaaccacaaagaatggatcatgatctaatcaggatggagcatgggccaatcacaatggagcaccgtccaatcaggctggagcatttttcagtcagaatggagcacgggccaatcacaatgga

SEQ ID NO: 6927 - DNA, 112 bp, homo sapiens
ccctctcctctctgtcctcctcctcgccattatttttgctgctccaccaaagtggggagcctggtgactgcacctcccctctcctctctgtcctcctcctcaccattatttt

SEQ ID NO: 6928 - DNA, 101 bp, homo sapiens
tgttcactcctgtcaggggctcccgggcagcgtgtggatgaagcaggaggatgaagggcagacctgggacccgtctcatgttcactcctgtcaggggctcc

SEQ ID NO: 6929 - DNA, 98 bp, homo sapiens
gtgcctgggctgcccagagcagtcacgcaccccaggcctgagctgaagcagtgccctatatcccaggaaaccgtgcctgggctgcccagaacagtcac

SEQ ID NO: 6930 - DNA, 82 bp, homo sapiens
ttgtgagcccagggaaggcgcctgacccagccagctatggggtgtgcagaggggttgtgagcccagggaaggcacctgaccc

SEQ ID NO: 6931 - DNA, 97 bp, homo sapiens
agacccatccatattgaaatgtgtcccatccccacacacaatgattttgtaaggtcgtgtgagacccatccatattgaaatgtgtcccgtccccaca

SEQ ID NO: 6932 - DNA, 108 bp, homo sapiens
gtgatcctcccacttagcctcctgagttggagtgcagtgccacagtctcagctctctgcagccttgacctcccacgctcaagtgatcctcccactcagcctcctgagt

SEQ ID NO: 6933 - DNA, 97 bp, homo sapiens
ggcctcccctcctaatacctgccttgtccccaggtcctctgccgtccacaggtcaggcagggctgctgaggcctcccctcctaatatctgccttgtc

SEQ ID NO: 6934 - DNA, 103 bp, homo sapiens
cctctgctgactgggacccacttctgatgccctgagcccccactgctggctgggacccacttctcacatcctgagccccctctgctgactgggacccacttct

SEQ ID NO: 6935 - DNA, 98 bp, homo sapiens
ccagctgcccttgttcttttcacgtttatatcagagtgctgggatcacaggcgtgagcccccgtgtccagctgcccttgttcttttcatgtttatatc

SEQ ID NO: 6936 - DNA, 76 bp, homo sapiens
gaggggagtgattctgacagggctcatgtctctgactctgatcctctatgcgagaggagtgattctgacagggctc

SEQ ID NO: 6937 - DNA, 118 bp, homo sapiens
cctgcatcgggcagcatcggctcatcgacggtgacacagtcacactcacgcacgccagccccccgtgagccacggccctcagtgagtttcctgcatcgggcagcattggctcatcgac

SEQ ID NO: 6938 - DNA, 88 bp, homo sapiens
cctgcccccactggagagcagcttccaacccatccgagaagacccctgggggctccctcagccccctgcccccatggagagcagcttc

SEQ ID NO: 6939 - DNA, 90 bp, homo sapiens
gaagggtttccatgctgagccacaggcccggccacggtgcaaagctgtggggggactccgaggaagaagggttttcatgctgagccacag

SEQ ID NO: 6940 - DNA, 121 bp, homo sapiens
ggccagcaaccctctccagagggggtagccccggcgtcttaggggccttcgtaacctgtggctgtgagctgtggggcggggtgtccacgggccagcaaccctctccagaggggatagcccc

SEQ ID NO: 6941 - DNA, 70 bp, homo sapiens
gttccccctcccccgttccctcttctccccgtttcctctccctcaccgttccccctccccctgttcccct

SEQ ID NO: 6942 - DNA, 89 bp, homo sapiens
gggacacagggacggggacactccccactctcccctgggacacgggaatgctctccactctcccctgggacacagggacgggaacactc

SEQ ID NO: 6943 - DNA, 116 bp, homo sapiens
gtgcctataatcccagctacactagaggctgaggcagaaaaaaattaaaaaaataaaaattagctaggcatggtggtgtgtgcctataatcccagctacactagaggctgaggcag

SEQ ID NO: 6944 - DNA, 99 bp, homo sapiens
gtgcgtaaacatgtctacgtttctgagtaaccacgcgcatgcgtataggcaaagacatgcgtgtgtgcgtaaacatgtctgcgtttctgagtaaccacg

SEQ ID NO: 6945 - DNA, 96 bp, homo sapiens
tgcctggggctgctccgtggccatctggatgcgtgcacacggcagcaggggcagccgggatgtggcttacgtgcctggggctgctccgtggccatc

SEQ ID NO: 6946 - DNA, 98 bp, homo sapiens
gaccaactgccgtgaccccagcaacagcaactcttatacccaaaacctccccactccatccgcgaccaactgccgtgaccccagcaacagcaactctt

SEQ ID NO: 6947 - DNA, 111 bp, homo sapiens
agagcagccagacccggccacaatctcactgggggccccagcctacaacggcagccagcgcgcccccatgagcacagcaagtggaagagcagccagaccctgccacaatct

SEQ ID NO: 6948 - DNA, 116 bp, homo sapiens
ggggggggtcccaaagccttaacgagcagtcactgcaggccatccatgctaagcccccacaggtgagggatgaggggtggggggggggtcccaaagccttaacgagcagtcactgc

SEQ ID NO: 6949 - DNA, 98 bp, homo sapiens
gagacccaggcagatgaggattcacaggcacgcaacactgtgccgagtcaggaggccagggtgggagggtcccgagacccaggcaaatgaggattcac

SEQ ID NO: 6950 - DNA, 82 bp, homo sapiens
tccataaaacacagctccttaccacacccgaggagtaactgccctgatctccctgcctccataaaacacggctccttaccac

SEQ ID NO: 6951 - DNA, 101 bp, homo sapiens
ctgtcgtaaccaagaaggaaatacacgcaggttcaggtcaaggtccccgtccacaggagaaagggatgtgttctaactgtcgtaaccgagaaggaaataca

SEQ ID NO: 6952 - DNA, 75 bp, homo sapiens
acaaaagaagtgaaaatggcctgttcctgccttagctgatgacattccactacaaaagaagtgaaaatggccggt

SEQ ID NO: 6953 - DNA, 125 bp, homo sapiens
gggagctgcaattcaagatgagatttgggtggggacatagccaaaacaagttatctcccaccaggtccctcccacatgtgggaattaagggagctgcaattcaagaagagatttgggtggggaca

SEQ ID NO: 6954 - DNA, 142 bp, homo sapiens
tctgcagcttcactcctgagccagcgagaccacgagcccaccgggaggaacgaacactccagacgcactaccttaagagctgtaacactcaccgcgaaggtctgcagcttcactcctgagccagcgagaccacgaacccacc

SEQ ID NO: 6955 - DNA, 87 bp, homo sapiens
gaggatgttacaaagtacattcacaagggcggggagggtgtattgtcacaagggcggagaggaatgttacaaagtacattcacaagg

SEQ ID NO: 6956 - DNA, 219 bp, homo sapiens
tactttcccactgaagtacctactaagtacttactttagtaggaaagtacctacttcagtgggaaagtacctactaagtactcacgcctggttaaaccttagtaggtactttagtaggaaagtacctacttcgaggatgttacaaagtacattcacaagggcggggagggtgtattgtcacaagggcggagaggaatgttacaaagtacattcacaagg

SEQ ID NO: 6957 - DNA, 89 bp, homo sapiens
tactaagcatctttcttgttattatcattgtcattttttattatttactactttattaagttactaagcatttttcttgttattatcat

SEQ ID NO: 6958 - DNA, 86 bp, homo sapiens
gaatgtaattttacaatggtgggttcggaagttttctttttcctctctttctctttaatagaatgtaatttaacaatggtgggttc

SEQ ID NO: 6959 - DNA, 106 bp, homo sapiens
tgtataacttttgactccctaaaaagttaagtactagtagcctactcttcactgagcccccctgcacagtcaaaaattcatgtattacttttgactccctaaaaag

SEQ ID NO: 6960 - DNA, 76 bp, homo sapiens
aaacggtcctgatgcgtgtgtccaggctttttttttttttttttaagactttaaacggtcctgatccgtgtgtcca

SEQ ID NO: 6961 - DNA, 106 bp, homo sapiens; identical to SEQ ID NO: 6959

SEQ ID NO: 6962 - DNA, 76 bp, homo sapiens; identical to SEQ ID NO: 6960

SEQ ID NO: 6963 - DNA, 108 bp, homo sapiens
gagcttttattttcagaaaatgtgtgtcttcttcttatttctttgatttttctcactgaccaattactagagcttttattttcagaaaatgtgtgtcttcttattatt

SEQ ID NO: 6964 - DNA, 81 bp, homo sapiens
accatttcaaccccagataattcttaataattcttataagaaatcaaaaaaaataccatttctaccccagataattcttaa

SEQ ID NO: 6965 - DNA, 90 bp, homo sapiens
tataatcctttagctagacacagagtgctgattggtgcgtttttacagagtgctgattggtgcatttacaatcctttagctagacacaga

SEQ ID NO: 6966 - DNA, 114 bp, homo sapiens
ggtacctgctatgaaccatgtgctaaaattaaaaaacccatgtttgggtttttgttttgttttgtttctgttttgttttgttattggtacctgctatgagccatgtgctaaaat

SEQ ID NO: 6967 - DNA, 85 bp, homo sapiens
tctgagctgactgaatcctcctaataaaagctgtgagtttggtgttatattagcaccaacttctgagctgacagaatcctcctaa

SEQ ID NO: 6968 - DNA, 84 bp, homo sapiens
tgccttaggaggaattcattaaatgaattcatttaattcattcattaattcatttaatgaattccttaggaggaattcattaaa

SEQ ID NO: 6969 - DNA, 83 bp, homo sapiens
atagttttgctggatatagaattctggatcaacataatttatctttaatttttgaaacatagttttgctggatatagaattct

SEQ ID NO: 6970 - DNA, 161 bp, homo sapiens
tgattggtccattttacagagtgctgattggtccattttacaaacgtccagctagccacagagcactgattggtgcattttacaaacctctagctagccacagagcaaccattggtgtgtttttacagagcactgattgattggtgcattttacaaaccac

SEQ ID NO: 6971 - DNA, 93 bp, homo sapiens
tatcaggattacgataacagagaaagtataaacaaaaccgccgtatcaggatcactgtatcgtatcaggattacgataacaaagaaagtataa

SEQ ID NO: 6972 - DNA, 106 bp, homo sapiens
gaagcacacacacacacacacacacacacacacacacacacacaggcaaacactctggctggacgtgggcagcatgaagcgcgcgcacacacacacacaggcaaac

SEQ ID NO: 6973 - DNA, 191 bp, homo sapiens
tgtctagctaaaggtttgtaaatgcaccaattagcactttgtgtctagctcaaggtttgtaaatgcaccaatcagcaccctgtgtctagctcaaggtttgtaaatgcaccaatcagtgctctgtgtctagctaatctagtggggacttggagaacttttacatctagctagaggattgtaaatacaccaat

SEQ ID NO: 6974 - DNA, 113 bp, homo sapiens
agcagggtccagggacctttgcgggttcttgggtaagggttgtttctgctgctgtgtccgtgagcacaactattctgatcagcagggtccagggaccgttgcgggttcttggg

SEQ ID NO: 6975 - DNA, 107 bp, homo sapiens
agctagacacagggtgctgattggtgcatttacaaaccttgaatagacacagggtgctgattggtgtgtttacaaaccatgagctagacacagagtgctgattggtg

SEQ ID NO: 6976 - DNA, 145 bp, homo sapiens
tgagataaacatcacataccatataattcactcttttcaagtgtacacttaaatggttttcagtatattcacaaaattgtgcaactttaaaaaactgagataaacatcacacaccatataattcactcttttcaagtgtacactt

SEQ ID NO: 6977 - DNA, 124 bp, homo sapiens
gagccccgcacccacccgtacactcggcctctgcccctgctctgtgcgtgggctcctgctctgtgcgtggcctcgccgccgagctggggtgagccccgcacccacccgtacacccggcctctgc

SEQ ID NO: 6978 - DNA, 83 bp, homo sapiens
attgttgttattagataaaataaaatgtatctagaggaagtcctttgtattctatattctattgttgttattagataaaataa

SEQ ID NO: 6979 - DNA, 92 bp, homo sapiens
ccttccctgctttttggtctgtcccttactagtttttattccctctagaaacttccttcttagcctccaccttccctgctttttggtctgtc

SEQ ID NO: 6980 - DNA, 101 bp, homo sapiens
tctaattaaaaatgagaaatgcctggcatggtattcatctaattgagaggtattcaattctaattgaagtagttattctaattgaaaatgagaaatgcctg

SEQ ID NO: 6981 - DNA, 89 bp, homo sapiens
ttcctaatattattagatttgggattgacatacatgatttacaagctctgtttctgtcttcctaatattattagatttgggattgacat

SEQ ID NO: 6982 - DNA, 106 bp, homo sapiens
ttgtatatatttatggtgtcaacatggttttgaaatatgtggaacaaatttttgtgatatacagttttaattgataaatattgtatatatttatggtatcaacatg

SEQ ID NO: 6983 - DNA, 100 bp, homo sapiens
atttattaccccaatattctacagaaaataaatttctgaactgtttaaccatttaaagacaagtaaccatttaagatttattactccaatattctacaga

SEQ ID NO: 6984 - DNA, 115 bp, homo sapiens
ttagccaaactatgaaacttgacctcattactcaggtagtgcaaagattagctgattcagttttaagtgcctgtaagtgaatatcttagccaaactatgaaacttgacctcatta

SEQ ID NO: 6985 - DNA, 115 bp, homo sapiens
tttctcagtcctccttgtggtctaggaggacaggcaagggtacaggtttttgagaatgcatcagtaagggccactaaatccgacctttctcagtcctccttgtggtctgggagga

SEQ ID NO: 6986 - DNA, 192 bp, homo sapiens
tctgtcaagctaaaggtttgtaaacacactgatcagtactctttgtctagctaaaggtttgtaaatgcaccaatcagcattctgtgtctagctaaaggtttgtaaatgcaccactcagtgcactgtgtctagctaatcgggtaggggacttggagaacttttgtgtctagctaaaggattgtaaatgcacca

SEQ ID NO: 6987 - DNA, 81 bp, homo sapiens
tttagaggattcagacatgattaatttaacttgattaattaaattaattaatattaatttagaggattcagacatgattta

SEQ ID NO: 6988 - DNA, 118 bp, homo sapiens
taaggtcacacagcagaagagatgggattagatgctagatattccaatatcaagtttagactattaaaaattcagtgacttgtgtaaggtcacacagcagaagagatgggattagatg

SEQ ID NO: 6989 - DNA, 119 bp, homo sapiens
attcatatgtctgttatgtgactaatgctcacattaaaaaaagttatgtgactttttttaattcatatgtctttttaattcatttattcattcatatgtctgttatgtgactaatgctc

SEQ ID NO: 6990 - DNA, 125 bp, homo sapiens
ataagtgtccatgaaatctttacaatttatgttcagagattgcagtaaagacaggcataagaaattataaaagttttaatttggggaactaataaatgtccatgaaatctttacaatttatgttc

SEQ ID NO: 6991 - DNA, 87 bp, homo sapiens
aacaaagcctccaagaaatatgggacaagacaagagaagagaaaaaagaatgagaaggaacaaacaaagcctccagaaatatgggac

SEQ ID NO: 6992 - DNA, 85 bp, homo sapiens
gataggatttctgacgttagaatctgtttaaaaattaatttgtatgcccattgttcttatagataggatctctgacgttagaatc

SEQ ID NO: 6993 - DNA, 312 bp, homo sapiens
gttcgggagggaggtgggggggtcagccccccgcccggccagccgccccatccgggaggcgaggggcgcctctgcccggccgcccctactgggaagtgaggagcctctccgcccggcagccaccccgtctgggaagtgaggagcgtctccgcccagcagccaccccgtccgggagggaggtgggggggtcagccccccgcccggccagccgcccggtccgggagggaggtgggggggtcagccccccgcccggccagccgcccggtccgggagggaggtgggggggtcagcctcccgcccggccagccgccc

SEQ ID NO: 6994 - DNA, 138 bp, homo sapiens
tagtttgctaaggtgatagcctccagctccatccatgtcactgcaaaggatataatcttgtacctttttatggtggcacactattccatggtgtatatatagtttgctaaggtgatagcctctagctccatccatgtc

SEQ ID NO: 6995 - DNA, 80 bp, homo sapiens
agagcctatgtaagtgttaaatatagtagttcacagatctattctttcttgacatgaagagcctatataagtgttaaata

SEQ ID NO: 6996 - DNA, 68 bp, homo sapiens
tatgtggagggattagctaactagcataagaaaatggtttggaaatttgataggattagctatgtagt

SEQ ID NO: 6997 - DNA, 107 bp, homo sapiens
tacttaatattaagtaatatggtcaaaacatacttgaccatactttactggttttgaccacattacttaatgtacttaatattaagtaatatggtcaaaccatactt

SEQ ID NO: 6998 - DNA, 73 bp, homo sapiens
ttccttaagacacttgactttccaacagtgccttggtaagaattaggcgagtccttaagacacttgactttcc

SEQ ID NO: 6999 - DNA, 82 bp, homo sapiens
aaatgatcatagattcattatagaattatatattcatcatttttatatatcattatacaaatgatcatatattcattataga

SEQ ID NO: 7000 - DNA, 77 bp, homo sapiens
tggattgtttgttaattcataaagttaggtcataaagttgttaattctgtattggattgtttgttaattcataaagt

SEQ ID NO: 7001 - DNA, 168 bp, homo sapiens
gccgtcccgtccgggaggtgaggggcacctctgcccggccgcccctactgggaagtgaggagcccctctgcccggccagctgccccgtccgggagggaggtgggggggtcagccacccgcccggccagccgcccctactgggaagtgaggagcccctctgcccggcca

SEQ ID NO: 7002 - DNA, 78 bp, homo sapiens
catcctatgaccacatttagcctcaaatcacaccagtcctattggattaaggccacatcctatgaccacatttaacct

SEQ ID NO: 7003 - DNA, 123 bp, homo sapiens
ctcatacccatccctgcttggaagcatagccctttcattgatttctgcttcctgtgtcctgccccaggtgagcccagcctcatacccatccctgcttggaagcatagccctttcattgatttc

SEQ ID NO: 7004 - DNA, 116 bp, homo sapiens
gtctcaaaaaaaaaaaaaataagttagtatgaagggtcacatctccagcctgggtgacacagcaagagtccgtctcaaaaaaaaaaaaaaataagttagtatgaagggtcacatct

SEQ ID NO: 7005 - DNA, 91 bp, homo sapiens
taattttgaatactgtagatcatggtagcaaaagtagaagtagccccttctactttctgtctttttaattttgaatactatagatcatggt

SEQ ID NO: 7006 - DNA, 153 bp, homo sapiens
gcttttctggggaaggggcaagtaccccaacccctcctctccttgtctctaccccttctctgcttttctgggggaggggcaagtacccctcaaccccttctccttcactcttagcagcaagtcctgcttttctagaggaggggcaagtacccc

SEQ ID NO: 7007 - DNA, 105 bp, homo sapiens
ttaaagtaaaaactatatatatatatatatatatatatatatatatatatatatatatacacacacacacacacacacatatatacatatatatatacacacata

SEQ ID NO: 7008 - DNA, 88 bp, homo sapiens
ggcagaggcttgggagaaatgctggattggaaacttagttaaaggtgttcttgccaaccagtgggtagaggcttgggagaaatgctgg

SEQ ID NO: 7009 - DNA, 98 bp, homo sapiens
catgattgtaagtttcctgaggcccttcaccttctgccatgattgtaagtttcctgaggcccttcaccttctgccatgattgtaagtttcctgaggcc

SEQ ID NO: 7010 - DNA, 90 bp, homo sapiens
taaaattaatactgctataaaccccagatgatatttatatttaacttcatagtttattaaataaaattaatactgctataaatcccagat

SEQ ID NO: 7011 - DNA, 80 bp, homo sapiens
ttattacagatatggtttacaaatattaaaaaatattaagggatattaaccccttattagagatatggtttacaaatatt

SEQ ID NO: 7012 - DNA, 125 bp, homo sapiens
taaaatacaaaaacaatggtaagtacacttatcattaattggtaaaattgtattggtaaaatacaaaaagtaattgtatgggtaaaatacaaaaacaatggtaagtacacttaccattaattggt

SEQ ID NO: 7013 - DNA, 90 bp, homo sapiens
caaagcctaagaggaccaccccaataaacaaatgtcaaaaagagttgggggaaagcatgcccaagcaaagcctaagaggactaccccaat

SEQ ID NO: 7014 - DNA, 75 bp, homo sapiens
aatgtcaacagttaaggcaggaacaggccattttcacttcttttgtggtggaatgtcatcagttaaggcaggaac

SEQ ID NO: 7015 - DNA, 80 bp, homo sapiens
catcagttaaggcaggaacaggccattttcatttctttttttgtggtggaatgtcatcagttaaggcaggaaccggccat

SEQ ID NO: 7016 - DNA, 73 bp, homo sapiens
caggagaggtgggcgtgattgatttctatcaatatagaaaatgtcacctcaggagaggtgggcgtgattgagt

SEQ ID NO: 7017 - DNA, 186 bp, homo sapiens
acctagatacagagtgtcgattggtgcattcacaaaccttgagctaaacacagggtactgattggtgtgtttacaaaccttgagctagatacagagtgccaattggtgtatttacaatccctgagctagacataaaggttctccaaggccccaccagagcagctagatacagagtgtcaattggtg

SEQ ID NO: 7018 - DNA, 107 bp, homo sapiens
ccacgtacttatgcagtgctcagagaaagcctgagccccattctctatcagacccttttcccatgaaccacgtacttatgcagtgctcagagaaagcctgagcccca

SEQ ID NO: 7019 - DNA, 141 bp, homo sapiens
tttcttatacaagaaactcagtttccaaactaaccaatcaaccatgtttcagataaaattctggattcctattctctgataaacaaacactttcttatacaagaaactcagtttccaaactaaccaatcaaccatgtttca

SEQ ID NO: 7020 - DNA, 142 bp, homo sapiens
ttaagccaggacaagaagtgcaaatgcctctttgaagcaatttaggctaaactgattttgaaatttcaaaatgttttattttactttgttttattaagccaggacaagaagtgcaaatgcctctttgaagcaattcaggcta

SEQ ID NO: 7021 - DNA, 83 bp, homo sapiens
atgcaaatactatgccattttatgtcagagacttgagcatcagagatgtgcataggttacatgcaaatactatgccgttttat

SEQ ID NO: 7022 - DNA, 106 bp, homo sapiens
ttaggaagtgggagtgatcctgagggagtaggggaagaaggccggtgagggatcccaagttatttatttgggatgtgatcttaggaagtggggtgatcctgaggga

SEQ ID NO: 7023 - DNA, 97 bp, homo sapiens
ggtttactaaagagaacttcctgagagaggagtaactctgctaagccataggggtattccctggttaaggaatggtttactaaagagaactttctga

SEQ ID NO: 7024 - DNA, 110 bp, homo sapiens
atctaaaggatcttgaacttagaacaaaaaggaaagcatataactactattaaataaaagtacaaaaatgaaataaaggatctaaaggatcttgaacttagaacaaaaag

SEQ ID NO: 7025 - DNA, 88 bp, homo sapiens
aatattttttgccccaaataacctcaaaggagtcttataacctcaaaagagtcttataaaaaatattttttgccccaaataacctcaa

SEQ ID NO: 7026 - DNA, 191 bp, homo sapiens
attgtaaaatgcaccaatcagcactctgtagttaggattgtaaaacgtgccaatcagcgctctgtggctagctagaggtttgtaaaatgagccaatcagtgctctgcggctagctagaggtttgtaaaatggaccaatcagcactctgtgaaatggaccaatcagcacactgcaaaatggaccaatcagat

SEQ ID NO: 7027 - DNA, 90 bp, homo sapiens
tactacctcctagtagtgcaaatacagttgagtgtcaattcaatgcaaagtatactaaaaggtgtactacctcctagtagtggaaataca

SEQ ID NO: 7028 - DNA, 89 bp, homo sapiens
aagtctagatttatgtgttttttcgcatagtctgtttactaagaattcttagtaaacagagtaccaagtctagatttatgtgttttttc

SEQ ID NO: 7029 - DNA, 93 bp, homo sapiens
gataataaaaatggaatcaggccaggtgaggtggctcatgtctgtaatcccagcactttgggcagtgatgataataaaaatggtatcaggcca

SEQ ID NO: 7030 - DNA, 125 bp, homo sapiens
ataaatgtctatgaaatcttcacaatttatgttcagatattgcagtaaagacaggcataagaaattataaaagtattaatttggggaactaataaatgtccatgaaatcttcacaatttatgttc

SEQ ID NO: 7031 - DNA, 72 bp, homo sapiens
aaaaacaaatagggaatgcagttaggttagattatttaatcttcaaaataaaagcaaatagggaatgcagtt

SEQ ID NO: 7032 - DNA, 111 bp, homo sapiens
agtaatatcacccccctctcccccccggatattaggagccacatcgcaggggggcgggcgccccccgcgatgcggggagtaatatcacccccctctccccccctggatatt

SEQ ID NO: 7033 - DNA, 101 bp, homo sapiens
tatatgtacaaagttatggagtatatgcacaaagttatttgtatatttttaaaaaatatataccaagttatgggtatatgtacaaagttatggggtatatg

SEQ ID NO: 7034 - DNA, 71 bp, homo sapiens
ccaatagtcttcaaaagaaatggtggtgaaattgaattctagctttgaccaatagtcttcaaaagaaatgg

SEQ ID NO: 7035 - DNA, 123 bp, homo sapiens
cttgtagattcttgatattagccgtttgtcagatggatacattggttgtttgctttttcttgtaaatttatttaagtcccttgtagattcttgatattagccatttgtcagatggatacattg

SEQ ID NO: 7036 - DNA, 103 bp, homo sapiens
gaaggggttgaggggtacttgcccctgccccaggaaagcagcacttgctgctaagggtgaaggggaaggggttgaggggtacttgcccctgccccaggaaagc

SEQ ID NO: 7037 - DNA, 104 bp, homo sapiens
ttgtcctgagcgatgggatctgatgccttttgatggctgcttttttagctaccttgtcagcataagcgttgtcctgagcgatgggatctgatgccttttgatgg

SEQ ID NO: 7038 - DNA, 110 bp, homo sapiens
ggggactctaaaaggagggggtagggcaagggctgaaaaatggggagctaaatgctgggtacacacagacataaagatagagattggggactctaaaaggagggtgtagg

SEQ ID NO: 7039 - DNA, 74 bp, homo sapiens
agcctgccaaagttctaagactgaggctgactgccttcatcataccaagaagcctgccaaagttctaagactta

SEQ ID NO: 7040 - DNA, 74 bp, homo sapiens
cgccagtgcacttaagcctgggtaatagcgagacacagtgagctgagatcacgccagtgcacttaagcctgggt

SEQ ID NO: 7041 - DNA, 99 bp, homo sapiens
aatgcaaagttctatgccaagtaggcaatatgagggagaggatcaactcaactttactaagtgccttattacaatgcaaagttctatgtcaagtaggca

SEQ ID NO: 7042 - DNA, 91 bp, homo sapiens
tccattttactaaagaacaaaaactactaaacaacaaaaactaaaagagatgtagactatactacatctattttactaaagaacaaaaact

SEQ ID NO: 7043 - DNA, 74 bp, homo sapiens
aaaactggaaggaaatatattaagatggattttaagaaggaaatatattaaaatggaaggaaatatattaaaat

SEQ ID NO: 7044 - DNA, 93 bp, homo sapiens
ttctgttattgagccgattcactgagttttacattttttaaatgatagttttcagttcttaattctgttattgagcccattcactgagtttta

SEQ ID NO: 7045 - DNA, 78 bp, homo sapiens
tgggaaagtttggaacttcctagatacttggagggctcagtagacaggaagatgtgggaaagtttggaacttcctaga

SEQ ID NO: 7046 - DNA, 88 bp, homo sapiens
ctgcttttctgggggacaagaacccccccgaccccttctctccgtgtctctaccccttcactgcttttctggggggcaagaacccccc

SEQ ID NO: 7047 - DNA, 78 bp, homo sapiens
aagtttggaacttcctagagacttggaggactcagaagacaggatgatgtgataagtttggaacttcctagagacttg

SEQ ID NO: 7048 - DNA, 104 bp, homo sapiens
tggtctccacaaccccttatcttaacccagacatccccttctgttggttctatctgcataatggaaaccctggtctccataaccccttatcttaacccagacat

SEQ ID NO: 7049 - DNA, 84 bp, homo sapiens
tccagcctgggcgacagagtgagactgtctcaaatcaatcaatcaatcaatcaatcagtccagcctgggcgacagagtgagact

SEQ ID NO: 7050 - DNA, 189 bp, homo sapiens
actcattttaagtagttcctaccagaataatttagtagcatgtattggcatttctaagactttttttttttttttgaaagagtctcgctctgtgttttattaatcggttccaagattgagcatttactctgtttactttttaaatgactcattttaagtatttcctaccagaataatttagtagcatgt

SEQ ID NO: 7051 - DNA, 158 bp, homo sapiens
caccaatcggcactctgtatctagctcagggtttgtaaacacaccagtcagcactctgtgtctagctcagggtttgtgaatgcaccaatcgacactctgtatctagctactctggtggggccttggagaacctttgtgttgacactctgtatctagct

SEQ ID NO: 7052 - DNA, 125 bp, homo sapiens
ataaatgtccatgaaatcttcataatttatgttcagagactgcagtaaagacaggcagaataaattataaaagtattaatttggggaactaataaatgtccatgaaatcttcataacttatgttc

SEQ ID NO: 7053 - DNA, 75 bp, homo sapiens
acacaaaggttctccacgtccccactacattagctagatacagagtgtccacacaaaggttctccaagtccccac

SEQ ID NO: 7054 - DNA, 124 bp, homo sapiens
ataattcttttatatatatatttttaaaaaacaaatgattgtgattctccctcctccatctttctcctcctcctccttcttccttcataattcttttgtatatatatttttaaaaaacaaatga

SEQ ID NO: 7055 - DNA, 80 bp, homo sapiens
ctatattttgtttattgtaacggaattcagactttgtactatgtttatgtatactatattttgtttattgtaagggaatt

SEQ ID NO: 7056 - DNA, 101 bp, homo sapiens
acaagtcactggaactatgttttaattaggtgcttcttaaaacactttgaaatagaataaaaatttttaacaaaatcacaagtcactggaactatatttta

SEQ ID NO: 7057 - DNA, 74 bp, homo sapiens
agcagaaccactgataagggtccaacaaagatcatagggcaaagggcaaaagcagaaccactgataagggtcta

SEQ ID NO: 7058 - DNA, 125 bp, homo sapiens
ataaatgtccatgaaatcttcactatttatgttcatagattgcagtaaagacaggcataagaaattataaaagtattaatttggggaactaataaatgtccatgaaatcttcacaatttatgttc

SEQ ID NO: 7059 - DNA, 83 bp, homo sapiens
tggccgaactaatttacactcttctgttttaagttctttgagaaatcaccacaccgcttttcgccgaactaatttacactctt

SEQ ID NO: 7060 - DNA, 109 bp, homo sapiens
atacggggagtaagagccagcccctccccccccctccccggctattaagacccacatcgcaaaggggtgaggcaccccccaccatacggggagtaaaagccagcccctc

SEQ ID NO: 7061 - DNA, 108 bp, homo sapiens
gcagaagagcagaagaaaaagaacccaggccgcaaagccgttttttttttttttaagacagagtcttgctctgtcgccagagcagaagagcagaagaaaaggaaccca

SEQ ID NO: 7062 - DNA, 118 bp, homo sapiens
tagcagaaagttggatttaaaaataaaagttttatttttaaataaaaatatgggaaaaataaaaattttccccatattgatatgatatagcagaaagttggatttaaaaataaaagtt

SEQ ID NO: 7063 - DNA, 123 bp, homo sapiens
ttatttaaactaggacattgttctactccttaaataaatatagaagtaatcgagatgtttatttattcttggaaaactggaatataatattatttaaactaggacattgttctactccttaaa

SEQ ID NO: 7064 - DNA, 80 bp, homo sapiens
tgtattggctgttttatcgtttcttggtgtcactctgctgactttcttcttcattactgtattggctgttttatcttttc

SEQ ID NO: 7065 - DNA, 86 bp, homo sapiens
gagaaggggttgaggggtatttgcccctctcctagaaaagcagagaaggggtagagacaaggagagaaggggttgaggggtacttg

SEQ ID NO: 7066 - DNA, 102 bp, homo sapiens
aggtttcttgcacaccctgagaattgctctgtgagtctgaacttttccctgtgtactcaaccctctccccgccacaggaggtttcttgcacatcctgagaat

SEQ ID NO: 7067 - DNA, 108 bp, homo sapiens
ttctggctgattaaaacagtcaatatgatatactaagtttcagtcaagtttcagtcaagtttcagcaggattctggctgattaaaacagtcaatatgatatactaagt

SEQ ID NO: 7068 - DNA, 143 bp, homo sapiens
tagggccccactttgtggtaccaatttctgtctaagtcacatttcacattacccatgtaatgtgaaaggtgctttcacatgcttaggtaactgttctaatagggccccactttgtggtaccaatttctgtctaagtccatttg

SEQ ID NO: 7069 - DNA, 92 bp, homo sapiens
attggattgtgtgattatgaaagctataatatttatatattatatattggatatatgtgatatataattggattatgtgattatgaaagcta

SEQ ID NO: 7070 - DNA, 117 bp, homo sapiens
taacagtttgtggcttctatatttgagagtaaatttggctagatataatacatttatcttactttgtctttgcattataacagtttgtggcttttatatttgagagtaaatttggct

SEQ ID NO: 7071 - DNA, 268 bp, homo sapiens
agctagacacagagcactgattggtgtaattacaaaccttgagctagacacagggtgctgattggtgcgttttcaatccctgagccagacacacagtgctgattggtgcatttacaattctctagctagacataaaagttctccaagtccccatcagattagctagacacagagcacggactggtgcgtttacaaacctttagctagacacagagtgctaattggtgtgtttatgaactttgagctagacacagggtgctgactcatg

SEQ ID NO: 7072 - DNA, 76 bp, homo sapiens
cttataaataacaccatgctgaactattgctattacttattaactattgcttataaataacaccattcttataaat

SEQ ID NO: 7073 - DNA, 186 bp, homo sapiens
caccaatcagcactctatatctagctcaaggtttgtaaacacaccaatcagcaccctgtgtctagctcagggtttgtggatgcaccaatcagcactctgtatctagctaatctggtgggggcttggagaatctttatgtctagctaagggattgtgaatacaccaatcagtactctgtatctagct

SEQ ID NO: 7074 - DNA, 96 bp, homo sapiens
caaagtggttaaatggctatgtggacagaatatgagtacagacacgttcgtaactttttttgaaactttctaacaaagtggttaaatggctgtgtg

SEQ ID NO: 7075 - DNA, 110 bp, homo sapiens
acataagtgatttcaagaaagattgtgacacaaggatgtgcaaatgaaagtggaatgtggttgtgcatgtacataagtgatttcaagaaagattgtgacacaaggatgtg

SEQ ID NO: 7076 - DNA, 82 bp, homo sapiens
ttcacttcatctttgcatgtactttgacatgcaggtgagtgaagttttccaatgcttcacttcatctttgcgtgtactttga

SEQ ID NO: 7077 - DNA, 89 bp, homo sapiens
gtgagacaacaggaaaagttagacgataaattagtaaccactattagatgacccagaagtcctctgtgagacaataggaaaagttagac

SEQ ID NO: 7078 - DNA, 136 bp, homo sapiens
ttcttggtctcactgacttcaagaatgaagccacggaccctcgtggtgagtgttacagttcttaaaggtggtgttgtgtccggaattggtgggttcttggtctcactgacttcaagaatgaagccgcggaccctcg

SEQ ID NO: 7079 - DNA, 89 bp, homo sapiens
ttagtaatatctaaaagaagatattcctcctgatatcatggtgggtgtacaccctgtgatattatttgtaatatctaaaagaagatatt

SEQ ID NO: 7080 - DNA, 104 bp, homo sapiens
ctgtctgaatgtgtctgagtctatccacgttgaagtgtgtgtgtgtgtgtgtgtgtatgtgcgtgtatgtgtatgtacgtgtgtgtgtgtgtgtgtgtgtgtgt

SEQ ID NO: 7081 - DNA, 108 bp, homo sapiens; identical to SEQ ID NO: 241

SEQ ID NO: 7082 - DNA, 165 bp, homo sapiens
aaaggttctcctcctccccaccagattagctagatacagcgtgtccacacaaaggttctccaaggccccaccagagtagctagatacagtgtggattggtgcattcacaaaccctgagctagacataaaggttctccaaggtcccaccagagtagctagatacag

SEQ ID NO: 7083 - DNA, 86 bp, homo sapiens
attgagtattttaaaaattttatacatgtttcaggatattagaaagatggggctccaaaagattgagtattttaaaaattctatac

SEQ ID NO: 7084 - DNA, 92 bp, homo sapiens
aattcctaagtatacttactaaatataaatgtaaagtatactaatgtatgctttagaattcctaagtaaattcctaagtatacttactagat

SEQ ID NO: 7085 - DNA, 86 bp, homo sapiens
tttggctaaggaaaaaacaaggcactgtatatgttttctttaaatattgtgtcttctgatatttggctaaggaaaaaacaaggcac

SEQ ID NO: 7086 - DNA, 114 bp, homo sapiens
aggaagctatatactgcatttctcttcctttagtgtttcaataaaaatttttctttcaattaaaaaaaacttcatgaggtgaggaagctatatactgcatttctcttcttttag

SEQ ID NO: 7087 - DNA, 71 bp, homo sapiens
gtattttctcattgtctttattggcaatgtcaatatgatcaggcatctgtattttctcatcgtctttattg

SEQ ID NO: 7088 - DNA, 91 bp, homo sapiens
agaagaatggagtgtcctggaagctaatttgaaccaacaaaagagaatgaggacaagtggctagaagaatggagtgtcctggaagctaatt

SEQ ID NO: 7089 - DNA, 90 bp, homo sapiens
taagtctacaattaaaataagaatacagttgcaattaatcaagaatgctattgcaattgtagacttaagtatacaattaaaataagaata

SEQ ID NO: 7090 - DNA, 104 bp, homo sapiens
aaaaaaatgcttttgctgaagtttgtataataaattttaagaagccccagtcaggaagctatagcattacgtctacatgaaaaaaatgcttttgctgaagtttg

SEQ ID NO: 7091 - DNA, 75 bp, homo sapiens; identical to SEQ ID NO: 6273

SEQ ID NO: 7092 - DNA, 194 bp, homo sapiens
tgtctagctaagggattgtaaatacaccaatcagcactctgtgtcttgctcaaggttggtgaatgcaccaatcagcaccctgtgtctagctcaaggtttgtaaatgcaccaatcagtgctctgtgtctagctaatctagtggggacttggagaacttttttgtctagctcaaggtttgtaaacgcaccaatcag

SEQ ID NO: 7093 - DNA, 85 bp, homo sapiens
agcctgtggagcaggcgccaggagcggggagaggccaggcagtgggggcaggcatttctgagcctgtggagcaggtgccaggagc

SEQ ID NO: 7094 - DNA, 122 bp, homo sapiens
ctcgtctctactaaaaatacaaaaaattaggcaggcggatcacgagattaggagatcgagaccatcctggctaacccggtgaaatctcgtctctactaaaaatacaaaaatttaggcaggcg

SEQ ID NO: 7095 - DNA, 102 bp, homo sapiens
ctcctacgatccacatcgcaggggaatgcacacgccccgccatatgggaagtaggagcaacccccctttccccgcctgtctcctacgatccacatcgcaggg

SEQ ID NO: 7096 - DNA, 91 bp, homo sapiens
gtttacaatcctttagctagactcagagtgctgactggtgtgattttacagagtgctgattggtgcgtttacaatcctttagctagacaca

SEQ ID NO: 7097 - DNA, 120 bp, homo sapiens
agtttggccactaactccagtcaagagaggaataaatccagactccccaatgggaaaggtaaatgattacttcaatgtagtaggaattgagtttggccactaactccagtcaagagagga

SEQ ID NO: 7098 - DNA, 96 bp, homo sapiens
agcactgattggtgcatttttacagagtgctgattggtgcggttacagtcctttagctagacacacagcactgagtggtgcatttttacagagtgc

SEQ ID NO: 7099 - DNA, 113 bp, homo sapiens
agaatgcattggtaaggaccactaaatctgatttttctcagtcctccttgtggtctaggaggacaggcaatggtgcaggttttcaagaatgcattggtaagggccactaaatc

SEQ ID NO: 7100 - DNA, 80 bp, homo sapiens
actttgtcaccaattatattgtgtcatgtggattaaattagttaatgcttacaaagcactttgtcaccaattatattgta

SEQ ID NO: 7101 - DNA, 119 bp, homo sapiens
tgataaatgtccatgaaatcttcacaatttgtgttcagagactgaagtaaagacaggcataagaaattataagagtattattagggaaatgataaatgcccatgaaatcttcacaattt

SEQ ID NO: 7102 - DNA, 85 bp, homo sapiens
catggagtatttgtcttcccatgtttgtcttcccatgtttgttccacatatatgtgagaacatggagtatttgtcttcccatgtt

SEQ ID NO: 7103 - DNA, 75 bp, homo sapiens
ggaaggaaagaagagaaatgatatataatgattaactttataggaaggatggaaggaaagaatagaaatgatata

SEQ ID NO: 7104 - DNA, 82 bp, homo sapiens
gctgaggttttgataggctatgagcttttctcttggcactgcctttgctgtatcgctacgctgaggttttgataggctatgt

SEQ ID NO: 7105 - DNA, 108 bp, homo sapiens
cacctggtgaccatcaagcaggccccagaaacaaaaaaactccttatctgagaaactcagaagtataatgaagagagcaaagaccacctggggaccatcaagcaggcc

SEQ ID NO: 7106 - DNA, 98 bp, homo sapiens
aggatttggttttctatttctgttttaatttgctaaggatagctcccatgtgtaaatgaaaatatacaggatttggttttctatttctgctttaattt

SEQ ID NO: 7107 - DNA, 110 bp, homo sapiens
tcttacttcctgtcatgtgtgtggaacctgtaatgcaaacgtgtcaaagtcacacgcaaactaccttgaagggactttcacagtcttacttcctgtcttgtgtgtggaac

SEQ ID NO: 7108 - DNA, 83 bp, homo sapiens
agcagagagggtagctcctctctgctaggcaagttgtctccattagtgttcagctctcagcagagagggcagctcctctctgc

SEQ ID NO: 7109 - DNA, 102 bp, homo sapiens
tctgattggttgtggaaagcaaccagtcagacgctgaagtgaacttacaaagttatactcctatgcaaacatctgattggttgcggaaagcaaccagtcaga

SEQ ID NO: 7110 - DNA, 65 bp, homo sapiens
aaaaactctaaaaactcaaaaataagaaataacccattttttaaaaagtcacaaataagaaataa

SEQ ID NO: 7111 - DNA, 102 bp, homo sapiens
atttcaaatatctcacttttgaagagccacagaattcatgatcactgataacaataccatctccaaagtctccatttcaaatatctcacttttggagagcca

SEQ ID NO: 7112 - DNA, 113 bp, homo sapiens
atcttgctaacaaaagactcctttatacaaatatagaaagaagaggctaaaatatttagtattaaataaacattatcagatgaacatcttgctaacaaaagaatcctttatac

SEQ ID NO: 7113 - DNA, 72 bp, homo sapiens
caaaccacttcattcttctaattatttgggcctattgtatgatttttagcaaaccacttcattcttctaatt

SEQ ID NO: 7114 - DNA, 75 bp, homo sapiens
atcaggtaatttcttcagaaaaaaattgtatataatatgtgtatatgtaggtatcaggtaatttcttcagaaaaa

SEQ ID NO: 7115 - DNA, 96 bp, homo sapiens
ctgcaattatctcagaagacttccagaaagaaacacgtggtgagtaacatctatatttacataaaccctgcagttatctcagaagacttccagaaa

SEQ ID NO: 7116 - DNA, 76 bp, homo sapiens
taatggactcacatggctggggactcagttcacggagtttagtggacacagtttaatggactcacatggctgggga

SEQ ID NO: 7117 - DNA, 85 bp, homo sapiens
gtctctagggcttgtcagagaccttcatagcagcttgggcagttaaatgagaaagacgtctccagggcttgtcagagaccttcat

SEQ ID NO: 7118 - DNA, 123 bp, homo sapiens; identical to SEQ ID NO: 5029

SEQ ID NO: 7119 - DNA, 73 bp, homo sapiens
tcatttaattcttaataaactgtacatataccgtatcacattccataccttcatttaattctcaataaactgt

SEQ ID NO: 7120 - DNA, 81 bp, homo sapiens
ctagcacatgtagaattgtcctggttttctaaaaatccacttgatttaagaaaatctagcacatctagaattgtcctggtt

SEQ ID NO: 7121 - DNA, 74 bp, homo sapiens
gtaattgtttaaagctgcaatgcctgcaaggtacctcacagtatcttgtagtaattgcttaaagctgcaatgcc

SEQ ID NO: 7122 - DNA, 129 bp, homo sapiens
aaataatgtaaatctgcattttgtagaacccatgggtatgaaccacagatccaaataatgtaaatctgcattttgaagtaagtaatgtaaatctgcattttgaagtaagtaatgtaaatttgcattctg

SEQ ID NO: 7123 - DNA, 98 bp, homo sapiens
ctatactggttatctgatctagtaagctacataaatcatcacataacatggaagattatgacagacattctaaatctatactggttatctgatcaagt

SEQ ID NO: 7124 - DNA, 83 bp, homo sapiens
gaaatgcaggcagaggtgatcatgaaaggtataaaaggcattaatttaaatgcctgtcatgaaatgcaggcaggggtgatcat

SEQ ID NO: 7125 - DNA, 79 bp, homo sapiens
agtctctaggaagttgcaaactttctcacatcttcttgtcttctgagccctcccagtctctaggaagttccaaactttc

SEQ ID NO: 7126 - DNA, 81 bp, homo sapiens
tctctaggaagtttcaaactttcccacgtcttcctctcttcttctgagtcctccaaatctctagggagtttcaaactttcc

SEQ ID NO: 7127 - DNA, 90 bp, homo sapiens
aaaagcagaactactaataagggtctaacaaagatcacatgcttctgagggaacaggacaaagggcaaaagcagaactactgataagggt

SEQ ID NO: 7128 - DNA, 108 bp, homo sapiens
cagatgatcaaagaggatgttcttggattgaaatttcactatgtgatgataaacattgttataagtgtcctaacagatgatcaaagaggatgtttttggattgaaatt

SEQ ID NO: 7129 - DNA, 93 bp, homo sapiens
acacatacacaatggaatactatatatgagatatatatatatatatatatatatatacacaaacacacatacacacacacaatggaatactat

SEQ ID NO: 7130 - DNA, 88 bp, homo sapiens
tacatgtattatgtaatgtaacatatgtattatgtagcatatgtatatgtattatgtattatgtacatgtattatataatgtaacata

SEQ ID NO: 7131 - DNA, 117 bp, homo sapiens
aagaatactttgcatctacccctatgctcctactttatgctcctacttgacccattatccaacttaagtgctagacaacaaagaatactttgcatctacccctatgctcctacttta

SEQ ID NO: 7132 - DNA, 91 bp, homo sapiens
acagcccaaactggaaataatccacaattccgtcaacactagaatgcatatgtatatatctacagctcaaactggaaataatccacaattc

SEQ ID NO: 7133 - DNA, 85 bp, homo sapiens
ggagtccctgtgcatccataggaggttacttatggcgggggagtagccacaagaagatgtggagtccctgtgcatctataggagg

SEQ ID NO: 7134 - DNA, 97 bp, homo sapiens
atttttaaaatattttttattttatagataattgataattatcgataattttttaaatatcgaatatttttaaaatattttttatttcatagataat

SEQ ID NO: 7135 - DNA, 99 bp, homo sapiens
aagctgaggtttggtggcaggtttccaaggcagagagcaggtaatattcaaatctgtctcctcaagctgaggtttggtggcaggattccaaggcagaga

SEQ ID NO: 7136 - DNA, 79 bp, homo sapiens
taggaagttacaaactttcccacatcttcctgttgtctgagccctccaagatggtaggaagttacaaactttctcacat

SEQ ID NO: 7137 - DNA, 95 bp, homo sapiens
ttttggcttaggggaaggtcccctttgattggttgaagtttcaatcccttagcttgcagctatgacttatttttggcttaggggaaagtcccctt

SEQ ID NO: 7138 - DNA, 101 bp, homo sapiens
ctgggtgacagactgagaccctgtctcaagaagaaaaaaagtttatttttattcttttattcttactccagcctgggtgacagattgagaccctgtctcaa

SEQ ID NO: 7139 - DNA, 74 bp, homo sapiens
tgtattaacacatatgtatatgtattaacacaatatctaacacataatcttgtagtaacacatatgtattaaca

SEQ ID NO: 7140 - DNA, 77 bp, homo sapiens
tggtgaaaccctgtctctaccaaaaatacaaaaactccagcctggccaacatggtgaaaccctatctctaccaaaaa

SEQ ID NO: 7141 - DNA, 96 bp, homo sapiens
ctaccaactgtgggtctcctctcagctgagagctgagcagatgtagagacaacctgcctgcagagagaatctacccactgtgggtctcctctcagc

SEQ ID NO: 7142 - DNA, 98 bp, homo sapiens
actgcccaccagtgaccctgcccatcactgactgcctgccagtgaccccgcccagcagtgactgcccagcagatactgcccaccagtgaccctgccca

SEQ ID NO: 7143 - DNA, 98 bp, homo sapiens
aatcctttctctttcttcacagtatcctttctttttcttcacagtatctaaaacaagcttctctttcatagaaatcctttctctttcttcacagtatc

SEQ ID NO: 7144 - DNA, 80 bp, homo sapiens
gtgatttgtatatattactcctaacctttaaataaagtatatgttcttaacaccgttgtgatttgtatatattacttcta

SEQ ID NO: 7145 - DNA, 74 bp, homo sapiens
caactgaggtctgaaaatattaaatgaaaaattccacaagttatctggggccaactgaggtctgaaaatattaa

SEQ ID NO: 7146 - DNA, 85 bp, homo sapiens
atattattgaaccatatgtgtgtgtgtatatatgtgtgtatatatatgtatacacacacatatatatattgaaccatatgtgtgt

SEQ ID NO: 7147 - DNA, 113 bp, homo sapiens
ttttaacaagatccctgcttattcataagcaataaattaagctggaagcactagattagattagttaagcatttttaacaagatcccttcttattcataagcaataaattaag

SEQ ID NO: 7148 - DNA, 89 bp, homo sapiens
tatatatatgacttgtcctaagttatattagtattagagtgtgtgtgtgtatatatatttatatatatgacttgtcctaagttatatta

SEQ ID NO: 7149 - DNA, 103 bp, homo sapiens
accaggcatttgtaagagggtttattgggctagtctgattttaaatcagtgataatgaacctcaaatgcactcagtgttaccaggcatttgtaagaggcttta

SEQ ID NO: 7150 - DNA, 134 bp, homo sapiens
agtggcagggaccacatattgtcggtgttaaccactgttatcactggcccaggtcgagtgaggacgagtcatttccccactaagcacttggggagtggcagggaccacatattgtcagtgttaaccactgttat

SEQ ID NO: 7151 - DNA, 107 bp, homo sapiens
ttatttacataaatgttggtatactaaaagaattagactaaagatttgtttatataactgtatttatgtaagacttatttacataaatgttagtatactaaaagaat

SEQ ID NO: 7152 - DNA, 134 bp, homo sapiens
atttacaagaaaacaaacaaccccatcaaaaagtgggcaaaggatatgaacagacacttcttacaagaagacatttatttatgcagcagaacttaaatttacaagaaaacaaaccaccccatcaaaaagtgggc

SEQ ID NO: 7153 - DNA, 125 bp, homo sapiens
gtctcaaatatccatccatccattcatctatccatccatccatccatccatccatccatccgtccgtccgtccacccgtccgtctgtccgtctgttcatccatccatccttccatccatccatcc

SEQ ID NO: 7154 - DNA, 112 bp, homo sapiens
ggcacagtgctagatgctaggcacacaaaataaggcacaaaataatcatttattgcatgcctcttgtatgctggctgggcacagtgctagatgctaggcgcacaaaataagg

SEQ ID NO: 7155 - DNA, 88 bp, homo sapiens
attatataaaataaggattgaattacatttaagttactaatccattttgatttgatttctgtatattatataaaataaggattcaatt

SEQ ID NO: 7156 - DNA, 91 bp, homo sapiens
tatgtgtcattatttatgttgcttcaagcgcataaatacataaataatgacacattacataatgtattatgtgtcattatttatgtgcttg

SEQ ID NO: 7157 - DNA, 122 bp, homo sapiens
aaaacaatttcttgcatatagcactatgtaagagctagctactaccattactaatagagctagttcttatacagtgctatatataacagttccttgcatattccactatataagagctagct

SEQ ID NO: 7158 - DNA, 85 bp, homo sapiens
ggcattttcaggctgggtaaatattatgtaagaattggtaaaagttgtgtcagaaaagaaagggcattttaggctgggtaaatat

SEQ ID NO: 7159 - DNA, 96 bp, homo sapiens
aaaaaaaacacatttaaaagcaaagcgtgcacattatatgagaggattcaagatgctctgccaatctttccataaaaaaaacacatttaaaagcaa

SEQ ID NO: 7160 - DNA, 590 bp, homo sapiens
agggattgtaaacacaccagtcagcaccctgtgtctagctcggggtttgtggatgcacaaatctccactctgtatctagctaatctggtggggacttggagaatctttatgtctaactaaaggattgtgaatgcaccaatcagcactctgtgtctagctcaaggtttgtaaatgcaccaatctgtgctctgtgtctagctgatctggtggggacttggagaacctttatgtctagctaagggattgtaaatacaccaatcagcactgtatctagctcaaggtttgtaaacacaccaatcagcaccctgtgtctagctcagggtttgtgaatgcaccaatcagcactctgtatctagttaatctggtggggacttggagaatatgtctagctaagggattgtgaatgcaccaatcagcactctgtatctagctcaaggtttgtaaatgcaccaatcagcactctgtgtctacctcagggtttgtaaatacaccaatccacactctgtatctagctaatctagtggggaggtggagaacttttgtgcccggctcagggattataaacgcaccaatcagcaccctgtcaaaaa

SEQ ID NO: 7161 - DNA, 230 bp, homo sapiens
caccaatcagcactctgtgtctagctcagggttcgtggatacaccaatcagcactctgtatctagcctggtggggacttgcagaacttttatttctagctaggggattgtaaatgcaccaatcagcactctgtgtctagctcagggattgtaaatgcaccaatcagcactctgtcaaaacaggccaatcagctctctgtaaaatggaccaatcagctctctgtaaaatgg

SEQ ID NO: 7162 - DNA, 156 bp, homo sapiens
aatcccttatttccgtgtcccgacctcttatctctgtgccccaatcccttctttccgcaccctgacctcttatctcttgtgccccaatcccttatttccacgccttgacctcttatctctgtgccccaaccccttatttccatgccccgactcctt

SEQ ID NO: 7163 - DNA, 118 bp, homo sapiens
ctttattatccaatggaaactttattatcaaatggaaactttgttaataaataataaacaaacatttttattttgttgataataaaaaatgctttgttatcaaatggaaactttgtta

SEQ ID NO: 7164 - DNA, 97 bp, homo sapiens
taatgaagagatatatctcttcattagtcagagactcagtattaagatgttcatttttgaagagaagttcaataatgaagagatatatctcttcatt

SEQ ID NO: 7165 - DNA, 82 bp, homo sapiens
caaatttttatgtatttaaaaaattattttactagtcattttacttctcattgttacaaatttttatgtatttaaaaaatta

SEQ ID NO: 7166 - DNA, 77 bp, homo sapiens
cttggtcacagtcagaattattatgttttgatggttgtattgttatcttttgacttggtcacagtcacaattattat

SEQ ID NO: 7167 - DNA, 98 bp, homo sapiens
ttttttttgtgcggggagaaagtaaggggagagagtcaattttttttttttatttttttttttattttttttgtgcggggagaaagtaagggaagaga

SEQ ID NO: 7168 - DNA, 82 bp, homo sapiens
tattggcttggttatgggtactctcttgagctctgccaactgaacagatagaacatattggcttggttatgggtactttctt

SEQ ID NO: 7169 - DNA, 235 bp, homo sapiens
gcatgtttgcacttataagtggtggataaacaatgggtatacatagagatacagaataaataaaaaagcaagtaaagttaaacatcgcatgtttgcacttataagtggtggataaacaatgggtatacatagatatacagagtaaatgaataaataaaaaaacaagtaaagttaaacactgcatgtttgaacttataagtgacatataaacaatgggtacacatagatgtcagga

SEQ ID NO: 7170 - DNA, 109 bp, homo sapiens
cactcacctggagagcctgagctgcccctcttgctatgcaaagaccttggtgtagcagcacactctctgcacactctctcagcacactcacctggaaagcctgagctgc

SEQ ID NO: 7171 - DNA, 77 bp, homo sapiens
tgttgtaaaaaagtcaaaagcaatcctgaataattgaaataattactcagttattgttgtaaaaagtcaaaagcaat

SEQ ID NO: 7172 - DNA, 100 bp, homo sapiens
acccccatgatccaaacacctccctggaacttatagtaaaataaataaataaataaataaataaataaataaactctacccccatgatccaagcacctcc

SEQ ID NO: 7173 - DNA, 124 bp, homo sapiens
taagtgtctatcaatggatgattggataacacatatatacatacatacatacatacatacgtaaaaatagcaaagatgtggaagtaacgtaagtgtctatcaatggatgattggatacacatac

SEQ ID NO: 7174 - DNA, 107 bp, homo sapiens
taattcgacagtggtcgtagctttagaagatatgcttcttaatgcaataaatccattggcaatttccttataacctattttataattggacagtggtcgtagcttta

SEQ ID NO: 7175 - DNA, 107 bp, homo sapiens
attcttcccttattgcagttatctaattatttattcttcccatattgcagttatgtacatacacacatatataagttgatagatttttcccttattgcagttatcta

SEQ ID NO: 7176 - DNA, 108 bp, homo sapiens
agaatagtgagaacaaaacatttataaaatttcatcctaaaagcaaaatttgttaatatatatacaaacacaaaggagacagagaatagtgagatcaaaacatttata

SEQ ID NO: 7177 - DNA, 73 bp, homo sapiens
taattagggagatacaaatataaattataagtaatttatgtatctttagtaattagggagatacaaattaaaa

SEQ ID NO: 7178 - DNA, 100 bp, homo sapiens
ttatcaacaataaagtttctgaggccttaacccaccatggtttgagaataaaaaggcctcaagccaccatgatttacttaccaacaataaagtttctgag

SEQ ID NO: 7179 - DNA, 98 bp, homo sapiens
gtcatctcaatgagtgtccagctctcagcagataggaaacccatagccggtagctcctttctgcatgcaggtcatctcgatgagtgtccagctctcag

SEQ ID NO: 7180 - DNA, 119 bp, homo sapiens
atatataataattgcacatattttggaggtacatatatttgtacatataattgtacatatataatatataatagtataattgtacatatataataattgtacatattttggaggtacat

SEQ ID NO: 7181 - DNA, 107 bp, homo sapiens
atgtgaaaagagggagcagaggaaaaagtcaattatgcatttgcctggtactcagtacatctacattttacataagataaggatgtgaaaagagggagtagaggaaa

SEQ ID NO: 7182 - DNA, 83 bp, homo sapiens
aagcaataggttacaccacacaatctaggtggatagtgggctgtatcatctaaatataacaagcaataggttataccacacaa

SEQ ID NO: 7183 - DNA, 79 bp, homo sapiens
aaagtttggaacttcctagagacttggaaggctcagaagacaggaggatgtgggaaagtttggaacttcctagagactt

SEQ ID NO: 7184 - DNA, 106 bp, homo sapiens
aaaggatatactaggccatgtgcttctccttgtcttctctttgtctaggccattgaaagcctatagtgagaaaaatagaaaggatatactaggctatgtgcttctc

SEQ ID NO: 7185 - DNA, 80 bp, homo sapiens
cataagttattctatataatctataaatattacaagagacaagagtgacaagaagcataagttattctatataatctata

SEQ ID NO: 7186 - DNA, 73 bp, homo sapiens
tatttcttatattttgctctgctaaatatatatatatttatctaatatttatttcttatattttggtctgcta

SEQ ID NO: 7187 - DNA, 97 bp, homo sapiens
acctaacaggaatcagctggccagtaacaactccacaattatccacttctccagagacttgtcttgacctaacaggaatcacctggccagtaacaac

SEQ ID NO: 7188 - DNA, 81 bp, homo sapiens
aagtctctaggaagttccaaactttcccacatcttcccgtcttctgagccctccaagtctctaggaagtgccaaactttcc

SEQ ID NO: 7189 - DNA, 80 bp, homo sapiens
atgcttcctgtagcttaaatggttaaatgtaggtaaatggcttccaggaagcttaaatgcttcctgtagcttaaatgctt

SEQ ID NO: 7190 - DNA, 101 bp, homo sapiens
attagcaaattctttgtatgcctttattcaactgttctgattgaggttcagcagtgttccttaaattaatattagcaaattctttgtatgactttattcaa

SEQ ID NO: 7191 - DNA, 107 bp, homo sapiens
ggcagaggcgctcctcacttcccagacaggacagcggccaggcagagctggtcctcacatcccagatgggggcagcagctgggcagaagcgctcctcacttcccaga

SEQ ID NO: 7192 - DNA, 135 bp, homo sapiens
tgtctaaacaattcacatacaagtacacacacttgcatatatatatataatatacacacacacatatatatgaaggagattttgtttttaattacattgtctaaacaattcacatacaaatacacacacttgcat

SEQ ID NO: 7193 - DNA, 107 bp, homo sapiens
caatacccaggtagtgagcatagtatctggtttgttacatgggtaaattgcatgtcagtagtgtttggtgcatgaataatctcattacccaggtagtgagcatagta

SEQ ID NO: 7194 - DNA, 74 bp, homo sapiens
aggacattttcacttcttttgtggtggaatgtcatcagttaaggcaggaacaggccattttcacttcttttgtg

SEQ ID NO: 7195 - DNA, 105 bp, homo sapiens
cttctaacatacaaaatggtaagatagtaagatagtattatcttctacttctaacatacaaacttcttctgcttctaacatacaaaatggtaagataataagata

SEQ ID NO: 7196 - DNA, 126 bp, homo sapiens
tatttagaaatttctatgacttaatacttaactctgagatatgccacatctgccaacacccttgctataattttttgtacaagtgagtttagtatttagaaatttctatgacttaatatttaactc

SEQ ID NO: 7197 - DNA, 82 bp, homo sapiens
tatttataaaaaaattgcaaaccaatttttgcaattttataattgcaattttttgcaatttttataaaaaaattgcaaacca

SEQ ID NO: 7198 - DNA, 82 bp, homo sapiens
ctctaggaagttccaaacttttccacatcttcctgtcttctgagccctccaagtctctaggaagttccaaacttttcaacat

SEQ ID NO: 7199 - DNA, 111 bp, homo sapiens
ctgagttttcactgatgtatgttctgtcacagaaagtttaggccactagtaacagagtatataataaaagattaaagagatactgagttttcactgatgtattttctgtca

SEQ ID NO: 7200 - DNA, 94 bp, homo sapiens
agaaaagcgggacttgccgctaagggtgaaagagaaggggttgaggggtacttgcccctccctcagaaaagcgggacttgccgctaaaggtgaa

SEQ ID NO: 7201 - DNA, 77 bp, homo sapiens
gtctctaggaagttccaaaattttctacatcttcttgtcttctgagctgtccaagtctctaggaagttccaaacttt

SEQ ID NO: 7202 - DNA, 87 bp, homo sapiens
tttctccctttctctgggttaacttacacaagtccgttattagacatataatttccaaatattttctccctttgtctgggttaactt

SEQ ID NO: 7203 - DNA, 99 bp, homo sapiens
tattttgtatctttgtttactttgttttgaagattgtttctaataaaatttagggaacttaaagaagagctattttgtttctttgtttactttgttttg

SEQ ID NO: 7204 - DNA, 111 bp, homo sapiens
tagtgaatatagtaataaattcattattatattcactttttaaattattgattataataataaattcaatattaatattatcaatataataaattcattattatatccact

SEQ ID NO: 7205 - DNA, 118 bp, homo sapiens
gacaaactatacaggcatggagatgacataataaacttatagacaaactatagacaaactatactatagacaaactatatatacttatagacaaactatacaggcatggagatgacat

SEQ ID NO: 7206 - DNA, 115 bp, homo sapiens
acagaatctcactctgtcgcccaggctggagtgcagtggcgccatcttggctcactattattactatttttgagacagaatctcactctgttgcccaggctggagtgcagtggcg

SEQ ID NO: 7207 - DNA, 95 bp, homo sapiens
ttttcacctctaagtccatatatgtctatatatatattttcacctctaagtccatatatgtctatatatatattttcacctctaagtccatatat

SEQ ID NO: 7208 - DNA, 89 bp, homo sapiens
gggtgtgaaaacaggaatgcctgtttccatttagagccatttacattaccaggtttccaggcttggggtgcgaaaacaggaatgcctgt

SEQ ID NO: 7209 - DNA, 121 bp, homo sapiens
atacaacctggacagagtcaatgtttactaactatgtgtttgctgatgacagtgtcatgcagacactttgcatacagtgcaaagcttagcatacaacctggacagagtcaatatttactaa

SEQ ID NO: 7210 - DNA, 106 bp, homo sapiens
tcagcactctgtaaaaacacaccaatcattgctctatgtctagctaaaggattgtaaatgcaccagtcagcactctgtaaaaacacaccaatcattgctctgtgtc

SEQ ID NO: 7211 - DNA, 100 bp, homo sapiens
gttatttctgagagtagaaaatgagagagagagagagagagagagagagagagaagatgggcctgggatcaaaagtgttatttctgagagtagaaaatga

SEQ ID NO: 7212 - DNA, 99 bp, homo sapiens
cctcctgggttcaagtgattctcctgcctcagcctgccaagtgcaatggcacaatctcagctcactgcaacctccacctcctgggttcaagagattctc

SEQ ID NO: 7213 - DNA, 70 bp, homo sapiens
aaaactccaattataagtgaaaatcagttctcatataaaactcaaattaaactccagttataaatggaaa

SEQ ID NO: 7214 - DNA, 83 bp, homo sapiens
ttttttttttttttgagatggagtttcgctctgtctccactcaaatctcatcttttttttttttttttgagacggagtttcgc

SEQ ID NO: 7215 - DNA, 111 bp, homo sapiens
ttggctgttggtaaccaactcaaccttcaacaacccgaggctttatcacttaggcatgatgtattatatcgttggctattggtaaccaactcaaccttcaacaacccgagg

SEQ ID NO: 7216 - DNA, 89 bp, homo sapiens
gacatgactcgctgcagcctcaacctgctgggctcaggtgatcctctggcctgcagtggtgcagacatgactcactgcagcctcaacct

SEQ ID NO: 7217 - DNA, 121 bp, homo sapiens
gttttcaagtaatttataatccagtaaaggagacagaaatgtacttgcagtggaattgaaagtaaatgatccttcgttttcaagtaatttataatccagtaaaggagacagaaatgtactt

SEQ ID NO: 7218 - DNA, 94 bp, homo sapiens
ttacagaagagtacaaggggtagagcattaagactgcaatcttacagtcaccaaaagtgagttacagaagagtacaaggggtatagcattaaga

SEQ ID NO: 7219 - DNA, 113 bp, homo sapiens
tacttttgtcttgctagtttcttttgtctttttgataacagtcattatcttgttaggacttttgctagtattattatcttgatagtacttttgtcttgctagtatcttttgtc

SEQ ID NO: 7220 - DNA, 81 bp, homo sapiens
caggccagaggaaggcctgctctctgtgacctgagttcagacatatgttaaccccccaggccagaggaaggcctgctctct

SEQ ID NO: 7221 - DNA, 72 bp, homo sapiens
cctctgcctcccgagtagctggggctcgggacctcatgccattctcctgcctcagcctcccgagtagctggg

SEQ ID NO: 7222 - DNA, 118 bp, homo sapiens
gaaaaatcttttcattctcaccacaaaagcagtgccgagactttaataaagatactttctttaactgtaaacttttcttgatcgaaaaatcttttcattctcaccacaaaagcagtgc

SEQ ID NO: 7223 - DNA, 74 bp, homo sapiens
acactctgtatctagctactctggtggggacttcaagaacctttgtgtccacactctgtatctagctaatctgg

SEQ ID NO: 7224 - DNA, 115 bp, homo sapiens
tatttcaccacatacaaaaattaaatcaagatggctgctgggatagccagccatatgaggaagaatgaaactggacccctgtatttcaccatatacaaaaattaaatcaagatgg

SEQ ID NO: 7225 - DNA, 101 bp, homo sapiens
ttcctgtgaaatcagaaagggagagggcgtactttcagtccacaaatagtccataacggtggttctgaaagtgatttcccgtgaaatcagaaagggagagg

SEQ ID NO: 7226 - DNA, 133 bp, homo sapiens
gaacataaattgtgaagatttcatggacatttattagttcccaaaattaatacttttataatttcttacacctgtctttactgcaatctctgaacataaattgtgaagatttcatggacatttgttagttccc

SEQ ID NO: 7227 - DNA, 78 bp, homo sapiens
tggggcaccctggacacctccaagagggtcttcatccctgtgggggctctggtggggcaccctggacacctccagagt

SEQ ID NO: 7228 - DNA, 122 bp, homo sapiens
caatcagaggctaaagtgaagttacaaagttgcacttctattcaaacgaagccttggcccacaatcagtctgattggttggggacagcaaccaatcagaggctgaagtgaagttacaaagtt

SEQ ID NO: 7229 - DNA, 94 bp, homo sapiens
tctttgtggaagtccagtgacccagatatagagatcttcttggaatatattactttgatggttactttctctttttggaagtccagtgacccag

SEQ ID NO: 7230 - DNA, 255 bp, homo sapiens
ttacagagagctgattggcccattttacagagagctgattggtccattttacagagagctgattggtccattttgacaggtgctgattggtgagtttacaatccccgagttaaacacagagtgctgattggtgcagttacaatcctctagctagacataacagttctccaagtccccaccagattagctagatacagagtgctgattggtgcagccacaaaccccaagctagacacagagtgctgattggtgcat

SEQ ID NO: 7231 - DNA, 205 bp, homo sapiens
gcctactgaggagcaagggtgcagcagaagggggacgagcccttcatacaccccatgccttcttctgaggcctgcagagagacagggaagcagagggccccacctctcaggcgcaggcgcatgaagcctgcagagagtcagggaagcagtggacctcacctctcgggggcaggcgcatgaagcctgcagagagacagggaagcag

SEQ ID NO: 7232 - DNA, 158 bp, homo sapiens
caccaatcggcactctgtatctagctcaaggtttgtaaacacaccaatcagcaccctgtgtctagctcagggtttgtgaatgcaccaatcgacactctgtatctagctactctggtggggacttggagaacctttgtgttgacactctgtatctagct

SEQ ID NO: 7233 - DNA, 123 bp, homo sapiens
atattgcaatagtcttttctaagaaagctcttccttacttaacttgtgcctggccccaaatgctaaactttcatcaaatattgcaatagtcttttctaagaaagctcttccttacttaacttg

SEQ ID NO: 7234 - DNA, 77 bp, homo sapiens
aggatcattattttcaggaagtacctcataagaaatatacaagttaatttgagaaggatcataattttcaggaagta

SEQ ID NO: 7235 - DNA, 79 bp, homo sapiens
ttataccaattattttagatttcttacataaaaatatgttataaaaataattgttatatcaattattttagatttctta

SEQ ID NO: 7236 - DNA, 99 bp, homo sapiens
agatatcttaaatcttctctcacattcaaagttctataggtctctagagcagaaatttcttctacgagatatcttaaatcttctctcacattaaaagtt

SEQ ID NO: 7237 - DNA, 89 bp, homo sapiens
atacttcatttctaaatcatgaaatacatacctatacaaatattccaacatgggcccacatacttcatttctaaatcattaaatacata

SEQ ID NO: 7238 - DNA, 111 bp, homo sapiens
ttttttgagagtttatcatgaatgcatgttgagagtgtttatcatgaatggatgtttttgttgagagtgtttgttgagtgtttttgagagtgtttgttgagattgtttatt

SEQ ID NO: 7239 - DNA, 117 bp, homo sapiens
aggatatttaatgatgttcacacttttatttttgatattggtaattaattgctcatagtatgttcttatttccaggatatttaataatgttcacacttttatttttgatattggtaa

SEQ ID NO: 7240 - DNA, 75 bp, homo sapiens; identical to SEQ ID NO: 2063

SEQ ID NO: 7241 - DNA, 115 bp, homo sapiens
tatgtgtgtccttatacatatgaaatgtatatttgatagtgtattaaaatatgatataaaagaatatccatattttagaagtatacatatgtgtgtccttatacatatgtaatgt

SEQ ID NO: 7242 - DNA, 75 bp, homo sapiens
gaaacccagcatgagtacctcagtctaggtgaatttttgcacagagaacatgaaacccagcatgagtacctcagt

SEQ ID NO: 7243 - DNA, 125 bp, homo sapiens
ataaatgtccatgaaatcttcacaatttatgttcagagattgcagtaaagacaggcataagaaattataaaagtattaatttggggaactaataaatgtccatgaaatcttcacaatttatgttc

SEQ ID NO: 7244 - DNA, 132 bp, homo sapiens
attggcacccgatgttgtagtggtccagcaagtgcaactgcatctggttgcagtgatgtacaaggaggttggattcagtggttagattggcacccgatgttgtagtggtccagcaagtgcaactgtatctgg

SEQ ID NO: 7245 - DNA, 87 bp, homo sapiens
ttagccctatataatcaagttcattacaagaaaaagctgaactgaaaattctatctaaaacttagccatatataatcaagttcatta

SEQ ID NO: 7246 - DNA, 120 bp, homo sapiens
tggaataaaggattagaacatagcataagttctaggagtacttatctgaataactctcatgtttatttcattaacactttgctggaataaaggattagaacatagtataagttctaggag

SEQ ID NO: 7247 - DNA, 76 bp, homo sapiens
ttatttatccgttctggcttatttgatccccagccctccaggggttgaggcattatttaaccgttctggcttattt

SEQ ID NO: 7248 - DNA, 113 bp, homo sapiens
tatcatagcatacatgagtgaacaacttaggacatttcagaaataccataacatacatgagtgaacaacacaagaaatttcagaaatatcataacatacatgagtgaacaact

SEQ ID NO: 7249 - DNA, 143 bp, homo sapiens
caattacacatatatatttataaaccatgataattgccatatatatatatgtatatatatatgtgtatatatatatatatatacacatatatatacacatatatatatatacatatatatatatatatatatatagagagaga

SEQ ID NO: 7250 - DNA, 78 bp, homo sapiens
gggaggtagaggttgcagtgagtgaaggctgagacaggagaatcgcttgaaccagggaggcagaggttgcagtgagtg

SEQ ID NO: 7251 - DNA, 75 bp, homo sapiens
gtaacaaacttacaatattaacaaactctgctccaaaccccactcagatacgtaacaaacttaccatattaacaa

SEQ ID NO: 7252 - DNA, 97 bp, homo sapiens
caaattccagctaacccatttcttgctgagtgacctggagaggcaggattgtgtctgagcccaaattccagctaacccatttcttgctgagtgacct

SEQ ID NO: 7253 - DNA, 99 bp, homo sapiens
attttctgatgtccagaatagctactaaacacataacttcatctctttaatcagaaaattaaattttctgatgtccagaatagctattaaacacataac

SEQ ID NO: 7254 - DNA, 122 bp, homo sapiens
tctattttgatagagattaatagaatgccattctttacagaaatagaaaaaacagtcctaaaatttatatggaaccatctctattcatttctattttgatagagattaatagaatgccattc

SEQ ID NO: 7255 - DNA, 93 bp, homo sapiens
ctcaccgatgcagcagcagaaacacctcttgcccaagaaccctggaccctctgattggaatagttgtgctcaccgatgcagcagcagaaacac

SEQ ID NO: 7256 - DNA, 142 bp, homo sapiens
caaacctttagctagacacagagtgtgctgattggtgcatttgcaaacctttagctagacacagagtgctgattggagtgtttttacagagtgctgattggtgcatttacaaacctttagctagacacagagcgctgattgg

SEQ ID NO: 7257 - DNA, 293 bp, homo sapiens
ttatagataaatgcagaatattttctttatgataatcattatctgttacatataaatactgaatatttttttgttaatatataacacaaacaatatgataattattgttatctgttatatataaatacagatacatatttgtgtgggcagaagacctgcccccatgattcaattacctcccatatcagcaaaaccatatcaggtggtaagtttcaatatttataaatattagaaatacttatgttatatataaatattctgtatttacattatatataaatattccgtattta

SEQ ID NO: 7258 - DNA, 72 bp, homo sapiens
tatttattgctgtatttatttctcaattcttctcaattgataatgcaattatttattgctgtatttattgct

SEQ ID NO: 7259 - DNA, 65 bp, homo sapiens
taaaataaatataacaaatatgtatgtcagaaataaatataacaaataaatataacaaataaaat

SEQ ID NO: 7260 - DNA, 139 bp, homo sapiens
ttgagggtaagggaaagttgtacaatggcttctttctaaatacaggtgacatcttgtgtcagtggacaccagacaggagaaatgcccctggccaggtttgagggtaagggaaagttgtacaatggcttctttctaaata

SEQ ID NO: 7261 - DNA, 95 bp, homo sapiens
tggcagacattaccaattaacacactattcccagtgagtgctcggactgagtcctccctcacacgtggcagacattaccaactaacacactattc

SEQ ID NO: 7262 - DNA, 130 bp, homo sapiens
gttaaatttaaactataacaagtaaaactgacatatacacgtttgttcctagtaacaactctgtctttgtgcactcagtttatctgtttatttagttaaatttaaactataacaagtaaaactggcatat

SEQ ID NO: 7263 - DNA, 125 bp, homo sapiens
gaacataaattgtgaagatttcatggacatttattagttccccaaattaatacttttataatttcttacgcctgtctttactgcagtctctgaacataaattgtgaagatttcatggacacttat

SEQ ID NO: 7264 - DNA, 77 bp, homo sapiens
tctttctagtgtgtgatgacctggctgctaactcttggtaaaggaggcatcgtctttctagtgtgtgatgacctggc

SEQ ID NO: 7265 - DNA, 77 bp, homo sapiens
cctgtacattacaacacaacgctgggccatctgacatcctttccaggcctgccccctgtacattacaacacaatgct

SEQ ID NO: 7266 - DNA, 91 bp, homo sapiens
atatctgttggctttatcaggggtttccgatactgttctcgtcgtactgaataagtctcacaatatctgttggctttatcaggggtttccg

SEQ ID NO: 7267 - DNA, 108 bp, homo sapiens
ctcagctcactgcaacctctgcctcctgggtttaagcaattctcctgcctctatcacccaggctggagtgcagcgatgcaacctcagctcactgcaacctccgcctcc

SEQ ID NO: 7268 - DNA, 95 bp, homo sapiens
accctctccagggcctcctctccgctgagagctgcagacatctggaggactagttgagaggagctaccctctccagggcctcctctctgctgaga

SEQ ID NO: 7269 - DNA, 87 bp, homo sapiens
tttttgctcatagaggtcttctcttcctattaattttttcacttgtaaaaaagcatgggccctttttgctcatagaagtcttctctt

SEQ ID NO: 7270 - DNA, 99 bp, homo sapiens
taaatggaagaggggtgacatttggtgaagtcctgtgccatggactgtataatgaatagccattaaatggaagaggggtgacatttggtgaaggcctgt

SEQ ID NO: 7271 - DNA, 125 bp, homo sapiens
tcagcaagcgactggccagcaaccacagtgatgctgcgcttctcacaagcactgagcaggcctgcagtccactgagctcagcaagcgactggccagcaaccacagtgatgctgcgcttctcacaa

SEQ ID NO: 7272 - DNA, 152 bp, homo sapiens
cccattttacagagagctgattggtctgttttacagagagctgattggtctgttttgacagggtgctgattggtgcgtttacaatcctgagctagacacaaaggttctccaagtccccaccagattagctagacacagggtgctgattggtg

SEQ ID NO: 7273 - DNA, 86 bp, homo sapiens
ggctagcctgtccccagcacacacacacccctcctgctccaactctaaggtgctaacccaggctggcctgtccccagcacacacac

SEQ ID NO: 7274 - DNA, 150 bp, homo sapiens
tccctgagaaggaggtagctgcttctaaaatctttcctagaatttttaaaatgtacctttacttgttttctacagggataaggaccttcctgttatccctgagaaggaggtagctgcttctaaaatctttcctagaatttttgaaatgta

SEQ ID NO: 7275 - DNA, 83 bp, homo sapiens
gctctggaaagaaggagccccgccctggatggatggaggtgcggatgaatggctagctctggaaagagggagccccgccctgg

SEQ ID NO: 7276 - DNA, 160 bp, homo sapiens
tgtctaatgatgatggacaggtatgttcagggtcaattgatggtggatgggcaccatgcccagtgtctaatgatgattcaattgatggtggatggacgccatgtccagtgtctaatgatgatggacaggtatgttcagggtcaattgatagtggatgggc

SEQ ID NO: 7277 - DNA, 111 bp, homo sapiens
cctcctagaccacaaggaggactgaggaaggttggatttagtggcccttaccgacgcattctcgtaaaacctgcaccttgcctgtcctcctagaccacaaagaggactgag

SEQ ID NO: 7278 - DNA, 107 bp, homo sapiens
ttcacatacactcatgcctgcatgcattcattctcccggaaccactctgaaccaggaagtgtgggtcaccaccttcacatacactcatgcatgcatgcattcattct

SEQ ID NO: 7279 - DNA, 94 bp, homo sapiens
agttatgtgctatgcccctacccctgggctgtgtccacagcgtctccaagcgtccagcatgtttctagttatgcgctatgcccctacccctggg

SEQ ID NO: 7280 - DNA, 93 bp, homo sapiens
gagggaaggttggggtgttcattgcacggaatgtgagtacgagcggctttggtcctctgcccagctaggtgagggaaggttggggtgttcttt

SEQ ID NO: 7281 - DNA, 91 bp, homo sapiens
gggcccttgtcttagtggacagatgaattgcttgggtgatgatgagctggctgggggtttggtgggcccctgtcttagtggacagatgaat

SEQ ID NO: 7282 - DNA, 116 bp, homo sapiens
ccagtccacggggtccggatccaagtgcactgttatcctcaaatccagtccacagggtccagatccgagtgcgctgttatcctcaaatccagtccacggggtccggatccgagtgc

SEQ ID NO: 7283 - DNA, 104 bp, homo sapiens
tgtggcctgtgctgggcacctcccatcagccagatgcacctgcgctcctggaggatgtaggaaaggggcatgtggcctgtgctgggcacctcccgtcagccaga

SEQ ID NO: 7284 - DNA, 92 bp, homo sapiens
atccagctgaaagagccacataggagcatacagagcacacacacacacccccaaggaaaaccacatccagctaaaagagccacataggagca

SEQ ID NO: 7285 - DNA, 132 bp, homo sapiens
acgccgtctgatgacgctctgtggatgttcctgtcttggttcagggactaggtagaagacgctctctgaacttgtgacgtgtgcctcgctagaaaacgccgtctgatgacgctccgtggatgttcctgtctt

SEQ ID NO: 7286 - DNA, 94 bp, homo sapiens
gcatcaccggtgggggctgggggcatgtgccagggcagtgctcagtccctggagcgaagaatgggtgatgagcatcaccagtgggggctggggg

SEQ ID NO: 7287 - DNA, 79 bp, homo sapiens
gcaaagaggactagaaggtgactccatttcctacatttcctacattcctctccagtgcaaagaggaatagaaggtgact

SEQ ID NO: 7288 - DNA, 76 bp, homo sapiens
actgccatcttaacaatatcaaacattgaaagtgtgtctcatgttggggaagcactgccatcttagcaatatcaaa

SEQ ID NO: 7289 - DNA, 108 bp, homo sapiens
gcccgtctggctgtgagcacaggctccctccaccagcacagagatctgggctgagatttgaaccccggcccgtctggctgtgagcacaggctcgctccaccagcacag

SEQ ID NO: 7290 - DNA, 83 bp, homo sapiens
acgcagagaactgaggcccaacacagtcctggcacccagccccctttccattacaaacgcagagaactgaggcccaagacagt

SEQ ID NO: 7291 - DNA, 96 bp, homo sapiens
gagtatgagatgggctgggggtgtccccctccctctgtacttgctcaagtacaggagcagcttgcctgagtctgagatgggctgggggtgtccccc

SEQ ID NO: 7292 - DNA, 106 bp, homo sapiens
aggggccctcaggatgccctgtgacgcgcaggtgtgactttgaatcgcgtcaaagaccgtcttggtgaatagtcaggggccctcaggatgccctgtgacgcgcagg

SEQ ID NO: 7293 - DNA, 84 bp, homo sapiens
gtggtggagacggacttcttattcttcagatgtgcccacctgcttgaggaaggaacggtggtggagacggacttcttattcttc

SEQ ID NO: 7294 - DNA, 98 bp, homo sapiens
gggcccgtggcacaggcttcctgccgccatcctgtgtggttgtgtgtctcagcacacatgcagtgggcccgtggcacaggcttcctgctgccatcctg

SEQ ID NO: 7295 - DNA, 82 bp, homo sapiens
gtgactgtttaaatcctcctcgctaacggatgggacgtgtgtgataacggtggcagtgactgtttaaatcctcctcgctaac

SEQ ID NO: 7296 - DNA, 80 bp, homo sapiens
cttcagggactagtaaatatgagagatactggaggatgaactccagaattagaactttagggactagtaaatatgagaga

SEQ ID NO: 7297 - DNA, 87 bp, homo sapiens
gggcgaggcagcgtggagagggagcgcagctctggagacggcccccagggcttgcgggcgggcgggcgaggcagcgtggagagcgga

SEQ ID NO: 7298 - DNA, 109 bp, homo sapiens
gggggaggaggaggaagggttctgagtggacgcggggactccatgccacgcggagggcagccgctcatgaggcggggtgtgggggaggaggaggaagggttctggagtg

SEQ ID NO: 7299 - DNA, 118 bp, homo sapiens
tggttgcctttaagatattcaaacagattttgaaaaaattcaaaattcagaaaaagtggttttgttctctgttgtgttttgtgattagtggttgcctttaaggtattcaaacagattt

SEQ ID NO: 7300 - DNA, 94 bp, homo sapiens
gcctgtaatcccagcactttgggagactgaggcaggaagatggcttgagagccgggcgtggtggctcacgcctgtaatcccagcacttcgggag

SEQ ID NO: 7301 - DNA, 998 bp, homo sapiens
ggactggagaggcagagggccggagtgtagatggagagggtcagtatatatacactcggagtcgcgggggccgggactggagagggagagggttggagtgtagatggagagggtcagtatatatatatacttggagtctcaggggccgggactggagagggagagggttggtgtgtagatggagagggtcagtatatatacactcggagtcgcgggggccgggactggagaggcagagggccggagtgtagatggagagggtcagtatatatacactcggagtcgcgggggccgggactggagagggagagggttggagtgtagatggagagggtcagtatatatatacactcggagtctcaggggccgggactggagagggagagggttggtgtgtagatggagagggtcagtatatatggactcagagccccaggggccggagtgtagacggagagggttggagtgtagatggagagggtcagtatatatagactcagagcctcagtggccggagtgtagatggagggggttggagcgtagatggagaaggttggagtgtagacggagagggttggagagtagatggagagggtcagtgtacatagactcggagccccaggtgctggaactggaagggggccggagtgtaaacggagagagtcagtatatatagatttggagccccaggtgctgggactggaagggggctggagtgtagatggagagagtcagtatatatagatttggagccccaggtgctggaactggaagggggccggagtgtagacggagagagtcagtatatatagatttggagccccaggtgctgggactggaagggggccagagtgtagacggagagggtcagtatatgtggactcggagccccaggtgctgggactggaagggggccagagtgtagatggagagggtcagtatatatggactcggagccccaggggccagaatgtagatggagagggtcagtatatata

SEQ ID NO: 7302 - DNA, 113 bp, homo sapiens
ggtatatctgtgtgcttacgtggtatgtgtgtgtatgtattcacgtgtatctgcatgtatgtgtggcgcacctgtggtgggggggcatgtgtctgcatgtgtggtgtgtgtgt

SEQ ID NO: 7303 - DNA, 90 bp, homo sapiens
tgtatatctgcatgcatgtgtggtgtgtgtgtgtgtatgagagctatcattgtatggttgtatatctgcatgcatgtgtggtgtgcgtgt

SEQ ID NO: 7304 - DNA, 99 bp, homo sapiens
ctgtcatcccagcgctttgggaggctgaggcaggaagatggcttgagagccgggcgcagcggcttccgcctgtcatcctagcgctttgggaggctgagg

SEQ ID NO: 7305 - DNA, 142 bp, homo sapiens
gtgcaggcgtccctcccagcactcggcatgaccgcgcttagcttccatcccccacccccccgtgcaggcatccctcccagcactcagcgtgactgtgctcagcctcaggactctagctttgcaggcgtccctcccagctcag

SEQ ID NO: 7306 - DNA, 138 bp, homo sapiens
cggtgtccatgtatctgcacacgagactcacgtccgtgtatctgcacacatgagtcacggtgtccatgtatctgcacacacgagacggtgtccatgtatctgcacacgagactcacgtccgtgtatctgcacacatga

SEQ ID NO: 7307 - DNA, 85 bp, homo sapiens
agcaggtgcccctcacaacaccgaaggtcccggcaccaggcagtctgtgggcctggggagcaggtgcccctcacaacactgaagg

SEQ ID NO: 7308 - DNA, 72 bp, homo sapiens
agccgccccgtccgggagggaggtgggggggtcagccccccgcccggccagccgccccgtccgggaggtgag

SEQ ID NO: 7309 - DNA, 97 bp, homo sapiens
ataggagggagcctgggcatcgctgcgtgcacccagaagctacatgaccccaggctcttacataggagggagcctgggcgtcgctgcgtgcacccag

SEQ ID NO: 7310 - DNA, 88 bp, homo sapiens
gccctctctgcagggcaggtcaggcaatgcctcctccaggaagcccccagtgcccctgcctcacgccctctctgcagggcaggtcggg

SEQ ID NO: 7311 - DNA, 93 bp, homo sapiens
ccaagatgacagccaaaaccaaagccacctctctcttcaggagcaagttgaaagccatccctcccagacacccagatgacagccaaaaccaaa

SEQ ID NO: 7312 - DNA, 350 bp, homo sapiens
cagagatgcgcacgccgcacgccgcacgcgcacgccgcacgccgcacgccgcacgcgcacgccgcacgcgcacgccgcacgcgcacgccgcacgcgcacgccgcacgcgcacgccgcacgcgcacgccgcacgcgcggcagtggcttggctggcttgtaacggcttgcacgtgcatgccgcgcgcgcacgccgcacgcgtataacggtttggctggcctgtaactgcttgcacgcgcatgccgcacgtgcgtaatggcttggctggcctgtaatggcttgcacgcgcatgctgcacgcgcgttaacggcttggctggcctgtaacactcggcatgcgcacactgcacgtg

SEQ ID NO: 7313 - DNA, 108 bp, homo sapiens
gattacaggcacgtgccaccatgcccggctatccacctcccaggttcaagcaattcttctgcctaagcctcttgagtagctgagattacaggcatgtgccaccatgcc

SEQ ID NO: 7314 - DNA, 91 bp, homo sapiens
ggtactaagcatctttcttgttattatcattgtcattttttattatttactactttattaaggtactaagcatttttcttgttattatcat

SEQ ID NO: 7315 - DNA, 85 bp, homo sapiens
ttccaaaaactattgaaatatatatatatatgaacttatctatgcaaccaaaaaccacctgttccaaaaactattgaaatatata

SEQ ID NO: 7316 - DNA, 81 bp, homo sapiens
ttccatatggatgccctcttaacctgaggcaggtgttggcttcttttctggttaccttccatcatggatgccctcttaacc

SEQ ID NO: 7317 - DNA, 121 bp, homo sapiens
gatgtaaacctctagttcagtatacacctgggcatggtcttcacttggggcctgctgtctacctgggccttgctgtcaacctggggcccgatgtaaacctctagttcagtatccacctggg

SEQ ID NO: 7318 - DNA, 121 bp, homo sapiens
cccaggtggatactgaactagaggtttacatcgggccccaggttgacagcaaggcccaggtagacagcaggccccaagtgaagaccatgcccaggtgtatactgaactagaggtttacatc

SEQ ID NO: 7319 - DNA, 82 bp, homo sapiens
ggttaagagggcatccatgatggaaggtaaccagaaaagaagccaacacctgcctcaggttaagagggcatccatatggaaa

SEQ ID NO: 7320 - DNA, 203 bp, homo sapiens
gccaaaccgttatacgcgtccggtgtgcgcgcacggcatgcacgtgcaagccgttacaagccagccaagccactgccgcgcgtgcggcgtgcgcgtgcggcgtgcgcgtgcggcgtgcgcgtgcggcgtgcgcgtgcggcgtgcgcgtgcggcgtgcgcgtgcggcgtgcgcgtgcggcgtgcgcgtgcggcgtgcgcgtgcg

SEQ ID NO: 7321 - DNA, 76 bp, homo sapiens
ttttccagtattactctaataataattatacctgttttccaggatttatacagttttccaggattactctaataat

SEQ ID NO: 7322 - DNA, 84 bp, homo sapiens
tcactcttgatatgcactgctcatctaaatatcttaatctagtctcctttctaaacatatcactcttgatatgcactgctcttc

SEQ ID NO: 7323 - DNA, 84 bp, homo sapiens; identical to SEQ ID NO: 7322

SEQ ID NO: 7324 - DNA, 80 bp, homo sapiens
tttataacatcaggcaatataatatataaataaatataaataagtttggaaacatatttataacatcaggcaatataata

SEQ ID NO: 7325 - DNA, 114 bp, homo sapiens
aaattgtacttctaacatttactagcttatcttaggtaagtaacttcgattgaaagttccagaactgcgttaaaattgtagttctaacatttactagcttatcttaggtaagta

SEQ ID NO: 7326 - DNA, 108 bp, homo sapiens
gccactgcactccagccagcctcaaaaaaaaaaaaaaaaattggttcacaagcaggttaagtggattgtgccactgactccagccagcctcaaaaaaaaaaaaaaaaa

SEQ ID NO: 7327 - DNA, 113 bp, homo sapiens
accctccacccagtattctttaggatcaggtgagtaagaactctgtttcagtgggggacaaaccccatctcatccacacacccccaccctccacccagtgttctttaggatca

SEQ ID NO: 7328 - DNA, 106 bp, homo sapiens
gcctgcttcataccagtttggagaaacttacctttctcagctatgtatgttatatccttcataaaaggcctgtttcataccagtttggagaaacttacctttctca

SEQ ID NO: 7329 - DNA, 113 bp, homo sapiens
tgcaatctcagctcactacaacctcagcctcctgggttcaagagattctcctgcctcatggagtacagtggtgcaatctcagctcactacaacctctgcctcctgggttcaag

SEQ ID NO: 7330 - DNA, 103 bp, homo sapiens
aagcagtgaaaaggagtcaggaaaatgggactaatctctactttgagagggagggaaagagatatagtgtgtatgtagaagcagtgaaaaggagtgaggaaaa

SEQ ID NO: 7331 - DNA, 89 bp, homo sapiens
cctgagtagctgggattacaggcatgcacctccagggttcaagagattctcctgcctcatctccctgagtagctgggattacaggcatg

SEQ ID NO: 7332 - DNA, 111 bp, homo sapiens
aaaacaaaacaaaacaaaaaaataccctaagaaacaattcattctggacttcttatctcacatatgaggtacaaaacaaaacaaaacaaaaaaataccctaagaagcaatt

SEQ ID NO: 7333 - DNA, 157 bp, homo sapiens
tctgtctagctaaaggtttgtaaatgcacccatcagcactctgtgtctagctaaaggtttgtaaatgcaccaatcagcaatctgtgtctagccaatctggtggggacttggagaacttttgtgtctagctaaaggattgtaaatgcaccaatcagca

SEQ ID NO: 7334 - DNA, 76 bp, homo sapiens
gaaatctaaaacacaaattccatccccgcccccgccccgctgtcaaggaccttgaaatctaaaacacaaattccat

SEQ ID NO: 7335 - DNA, 91 bp, homo sapiens
ttctgtgtctctctctgatctctgtctttctcttttacattatttttttccccagtctcaccttctgtgtctttctctgatctctgtcttt

SEQ ID NO: 7336 - DNA, 118 bp, homo sapiens
tgggaggtcaacttagtaggtcatgtccacagcgtattggtcttgctcttgttctaaggaaatgatgttagaatgtttagctcgctgggaggtcaacttagtaggtcacgtccacagc

SEQ ID NO: 7337 - DNA, 88 bp, homo sapiens
cataagacactgtctctcagctcattttccctgggcaatgtgtacacttcagtttctccataagacactgtttctcagctcattttcc

SEQ ID NO: 7338 - DNA, 97 bp, homo sapiens
gctttttcaaaagggaacattgagcccaatatctaacagaggagacagaaataagggggtgtcaaggctttttcaaaagggaacattgtgcccaata

SEQ ID NO: 7339 - DNA, 113 bp, homo sapiens
aattatttcatgctttatatttaaaacaaaatcaaatgttatttttaaacaacaaagaacatcaaatcattttagaaaattatttcatgctttatatttaaaacaaaatcaaa

SEQ ID NO: 7340 - DNA, 100 bp, homo sapiens
agtatatttcaaaataactaaacaagtgaaactttatattaacatgtatctagttatatatatatatagtatatttcaaaataactgaacaagtgaaact

SEQ ID NO: 7341 - DNA, 104 bp, homo sapiens
ttgtctcagatgagactttggactgtgtaaataacttgcttttgattttacaggctcataggtggaagggacttgtcttgtctcagatgagactttggagtgtg

SEQ ID NO: 7342 - DNA, 115 bp, homo sapiens
gcctgtaatcccagcacctttgggaggctgaggcgacaggatcacttgaggtcaagagtttgagaccggccgggcgcggtggctcacgcctgtaatcccagcactttgggaggcc

SEQ ID NO: 7343 - DNA, 144 bp, homo sapiens
acttgatatgatgttaattttttaatttgttaaggcttattctttttccaattttattcattactgatttctagttaaatgctattatagtcagaaaatatacttgatatgatgttaattttttaatttgttaaggcttgttct

SEQ ID NO: 7344 - DNA, 77 bp, homo sapiens
gtttggaactccctagagacttggagggctcagaagacaggaagatgagggaaagtttggaacttcctagagacttg

SEQ ID NO: 7345 - DNA, 134 bp, homo sapiens
aactccaacaagatttgaaataagttgataattattaatgtggttttggggtacttgaggtttattatatcatcgctctacttgagaatttcaactccaacaagatttgaaataagttggtaattattaatgtg

SEQ ID NO: 7346 - DNA, 101 bp, homo sapiens
ttggtattgatagttgatttttttttttttaatttttaacttttataacctcagacctaagctttcatggttggccttttggtattgatagttgatttttt

SEQ ID NO: 7347 - DNA, 88 bp, homo sapiens
tgcagaattggaggcttagagagattaagtcattcactcaagttcccaaagttataagtaaaagatgcagaattggaggctcagagag

SEQ ID NO: 7348 - DNA, 134 bp, homo sapiens
aagacaggtgtaagaaattatgaaagtattaattttgggaactaataaatttccatgaaatattcacagtttatgttcagagattgcagtaaagacaggtgtaagaaattataaaagtattaattttgggaact

SEQ ID NO: 7349 - DNA, 105 bp, homo sapiens
ttattaggttggtgcaaaactaattgcacccaaagtaacaattattaggttggtgcaaaagttattaggttggtgcaaaagtaatcaggttggtgcaaaagtaaa

SEQ ID NO: 7350 - DNA, 75 bp, homo sapiens
caataaatgtaaaatggaaatatctggaatgtcagaggttgatagcattttacaataaatgtaaaatggaaattt

SEQ ID NO: 7351 - DNA, 74 bp, homo sapiens
aatagacatgtctcaaaagaagatgtactaatggccaataggtatatgaaaaatagacatttctcaaaagaaga

SEQ ID NO: 7352 - DNA, 187 bp, homo sapiens
ttgtaaatacaccagtcagcactctgtgtctagctcaaggtttgtaaatacaccaatcagcactctgtgtctagctcaaggtttgtaaacacaccaatcagcactctgtagctagctaatctggtggggacttggagaatctttacgtctagctaaaggattgtaaacacaccaatcagcaccctgt

SEQ ID NO: 7353 - DNA, 76 bp, homo sapiens
ttgtaaatgcaccaatcagcaccctgtcaaaacagaccaatcagctctctgtaaaacagaccaatcagctctctgt

SEQ ID NO: 7354 - DNA, 76 bp, homo sapiens
gcatcacataaacacaaccaatgacaaaaccacatgatgatctcaatgtaaagcatcacataaacagaaccaatga

SEQ ID NO: 7355 - DNA, 79 bp, homo sapiens
tataaatccttagtttcattacttaaaataaagaaaaaacaggacttcttaatataaatctttagtttcattacttaaa

SEQ ID NO: 7356 - DNA, 93 bp, homo sapiens
ttcatgaatggtttccactcccactttgattgtttacacccttaattataaaaattgtttttataatttcatgaatggtttctactcccactt

SEQ ID NO: 7357 - DNA, 106 bp, homo sapiens
ccattttggattaattctcctaggtggatatagatcctttgtctaccatgtaacataagcggtcataaatggtcaaaactgccattttggattaattctcctaggt

SEQ ID NO: 7358 - DNA, 186 bp, homo sapiens
gctagacacagagcactgattggtgcattcacaaaccctgagctagacacagggtgctgattggtgcatttacaaaccttgggctagacacagagtactgattggtgcgtttacaatccctgaggtaaacagaaatgttcgccaagtccccaccagattagccagatacagagtgctgattggtgc

SEQ ID NO: 7359 - DNA, 119 bp, homo sapiens
tgataaatgtccaggaaatcttcacaatttatgttcagaggctgaagtaaagacaggcataagatattataagagtattattagggaagtgataaatgtccatgaaatcttcacaattt

SEQ ID NO: 7360 - DNA, 110 bp, homo sapiens
ttactgacgcattctcgaaaacctgcaccctttcctgtcctcctagaccacaaggaggacagagaaaaatcagatttagtggctgttacagacgcattctcgaaaacctg

SEQ ID NO: 7361 - DNA, 76 bp, homo sapiens
atgtacttccaatataccagtgcactatgctggatatgatatgctagataatactatgctataccagtgcactatg

SEQ ID NO: 7362 - DNA, 117 bp, homo sapiens
ctgaatagtactccattgtgtatatgtaccatattttgtttatctatttatctgttgatggacacttagcctactgaatagtactccattgtgtatatgtaccatattttgtttatc

SEQ ID NO: 7363 - DNA, 75 bp, homo sapiens
attctacaatcttgattctacaagggagatattattctaaagggagatattagcaatgcatacttgattctacaa

SEQ ID NO: 7364 - DNA, 95 bp, homo sapiens
cacttctggtcccaagctttttttttttcttcaagttgctattttaccaagttttttggtaaaacttcaaaacacttctggttccaagctttttt

SEQ ID NO: 7365 - DNA, 120 bp, homo sapiens
gcatggtgatatgcacctgtagtcccagctacaggtctggctaacatggagacaccctgtctctacaaaaaatacaaaagttagctgagcatgatgatatgcacctgtagtcccagctac

SEQ ID NO: 7366 - DNA, 140 bp, homo sapiens
gggtgaggttaaagaatttggtggcaccaactgtgagattcacctttattgtctatccttttgaactgtcttcccactcacttctctagctacaagaacgggtgagtttaaagaatttggtggcaccaactgtgagattc

SEQ ID NO: 7367 - DNA, 107 bp, homo sapiens
aagagtgattccaagtttctggcttggatgcggtgttaatggttgattggatgagaaggatgaagagataaggaatctaagatgattccaagtttctggcttggatg

SEQ ID NO: 7368 - DNA, 138 bp, homo sapiens
ccaacatggtgaaaccccatctctactaaaaatacaaaaattcttcgggaggccgaggcgggcggatcacctgaggtcgggagttcaagaccagcctgaccaacatggagaaaccccatctctactaaaaatacaaaa

SEQ ID NO: 7369 - DNA, 132 bp, homo sapiens
tttggtaggccaaggtgggagaatcacttgagcccaggagtacgagaccagcctggccaacacagtgagaccttgtctctacaaaaaaataaaaatttggtaggccaaggtgggagaatcacttgagcccag

SEQ ID NO: 7370 - DNA, 97 bp, homo sapiens
gtaaaattataccaaaggtagtattttaatctagatatctaacttacaaagtcttaattaagccttgagtaaaattataccaaaggtagtattttaa

SEQ ID NO: 7371 - DNA, 123 bp, homo sapiens
attaaacttcgtgcattgtacagttttcatttgtacatagcatagttttcattatcctattgtattgtatattaaacttcgtgcattgtaccgttttcatttgtacatagcatagttttcatt

SEQ ID NO: 7372 - DNA, 94 bp, homo sapiens
aaaggggactttcccctaagccaaagtaaggcatagctgcaagctaagggattgaaacttcaaccaatcaaaggggactttcccctaagccaaa

SEQ ID NO: 7373 - DNA, 88 bp, homo sapiens
cttttctggggaaggcgcaagtaccccaaccccttctctccctgtctctaccccttctctgcttttctggggaaggggcaagtacccc

SEQ ID NO: 7374 - DNA, 78 bp, homo sapiens
cttcttttgtggttcttcttttgtggttcttcagttgcttcttttgtggttcttcttttgtggttcacttcttttgtg

SEQ ID NO: 7375 - DNA, 94 bp, homo sapiens
aggtaagtattgcaaactaaaagaacttcttagccaactaaaagaacagcctgaagtatcaaagaaggttaggtaagtattgcaaactaaaaag

SEQ ID NO: 7376 - DNA, 111 bp, homo sapiens
catgtgctttccagtccaagggcagagtgaccttgacatgctatgtgctctccagaccaagggcagagagagacctggaaatgtcatgtgctttccagaccaagggcagag

SEQ ID NO: 7377 - DNA, 79 bp, homo sapiens
aagtttggaacttcctagagacttggatggctcagaagacaggacaatgtaatcaagtttggaacttcctagagacttg

SEQ ID NO: 7378 - DNA, 74 bp, homo sapiens
acacacacatacagttctgaaagatcgtgtatatgtatatatacacactcacacacatatacagttctgaaaga

SEQ ID NO: 7379 - DNA, 84 bp, homo sapiens
acatgtttggaaattcacccatctaatccttgaaaaatatattaatacaaattttaaaaacatgtttggaaattcaccaatcta

SEQ ID NO: 7380 - DNA, 88 bp, homo sapiens
tttagctagacacagagcactgaatggtgcgttttacagagtgctgtttggtgcatttacaatcctttagctagacacagagcgctga

SEQ ID NO: 7381 - DNA, 86 bp, homo sapiens
ctaagtaaatgagggaatatagccctgttgtatgtaaaaaatacacaaatgtatgtaaaagatctaagtaaatgagggaatacagc

SEQ ID NO: 7382 - DNA, 145 bp, homo sapiens
aagagaaggttttacaggatttctgcactaggatgcccacaaaggtttcttaattcaacccattataatccccccaaaatttactgtgaatcagaagagccaagagaaggttttacatgatttctgcactaggatgcccacaaag

SEQ ID NO: 7383 - DNA, 86 bp, homo sapiens
atttaggtttatggtatacataatatgaaggtatacattatattaggtgtacatttatttaggtatatggtatacataatatgaag

SEQ ID NO: 7384 - DNA, 104 bp, homo sapiens
aattcatttcaataagtataatgaaatttacttatataatgaagtatacttatatacttatatatgaagtataatgaaattcatttcaataagtataatgaaat

SEQ ID NO: 7385 - DNA, 81 bp, homo sapiens
attatagggcttatgtagggcttttttacctgtctccaccattaattatgagcatgctattatagggcttatgtaggggct

SEQ ID NO: 7386 - DNA, 143 bp, homo sapiens
aagttaaaatttagaaaatgttatcccttgcaaatagtaagtaaaagagactacaagagactcactttagatccaaataaacaaataggttcaaagttaaaatttaaaaaatgttatcccttgcaaatagtaagtaaaagaga

SEQ ID NO: 7387 - DNA, 77 bp, homo sapiens
ggaagttccaaattttcccacaccttcctgtcttctgagctctccaaatctcttggaagttccaaactttcccacac

SEQ ID NO: 7388 - DNA, 109 bp, homo sapiens
tatgctagcccaattaactttggctaatgagaataaagaaccaaaagtgttctcaaacagcaaaataatatacaatctatttttatgctagcccaattaactttggcta

SEQ ID NO: 7389 - DNA, 77 bp, homo sapiens
atctaataaatcataagcaatgtttatgaaatatggctcataaactttcacatctaatgaatcataagcaatgttta

SEQ ID NO: 7390 - DNA, 154 bp, homo sapiens
aaaaaaaagaggaggagaagaaaagaagaaagaagaaagaagaaagaagaaggagaaggagaaggagaagaagaagaagaagaagaagaagaagaggaggaggaggaggaggaggaggaggagaagaagaagaagaagaagaagaagaagaaga

SEQ ID NO: 7391 - DNA, 89 bp, homo sapiens
aaaactgtttatttccttacaacttagagtgtctcttctaattcaaattatttctgcctaacaaaactgtttatttccttataacttag

SEQ ID NO: 7392 - DNA, 161 bp, homo sapiens
caccaatcggcactctgtatctagctcaaggtttgtaaacacaccaatcagcaccctgtgtctaactcagggtttgtgaatgcaccagtcgacactctgtatctagctactctggtggggacttggagaagaacctttgtgtccacactctgtatctcgct

SEQ ID NO: 7393 - DNA, 128 bp, homo sapiens
tttttccttgtttttaatagaatcttgctctgtctcccaggcttaggaaaaaaatggtttcatactatttgttctttctttttcttttttccttgtttttaatagaatcttgctctgtctcccaggct

SEQ ID NO: 7394 - DNA, 92 bp, homo sapiens
ctggatttttccaggaagggaaatgagagacaacaaatgcaaaaaagaattagttatcaatctctggatttttccaggaagggaaatgagag

SEQ ID NO: 7395 - DNA, 97 bp, homo sapiens
gcaatttacagggaataagcaacagttgagccaaatccacaaactcatttctccttatgtggagaagggtgcaatttacagggaataagcaacagtt

SEQ ID NO: 7396 - DNA, 125 bp, homo sapiens
ataaatgtccatgaaatcttcacaatttatgttcagagattgcagtaaagacaggcataagaaattacaaaaggattaattttgggagctgataaatatccatgaaatcttcacaatttatgttc

SEQ ID NO: 7397 - DNA, 95 bp, homo sapiens
tgtcttttgcccactttttaatggagttgttttgtttttgtttttgttttttgagacagagtctcagtgtcttttgcccactttttaatggagtt

SEQ ID NO: 7398 - DNA, 113 bp, homo sapiens
tttcctctactccctcttttcacatgtttactttctcttacgtaggatgtagatatactgagcaggaggtgacaaataattcaatttttcctctactccctctttgcacatgt

SEQ ID NO: 7399 - DNA, 88 bp, homo sapiens
tccttcacccttagcggcaagtcccgctttcctggggcaggggcaagtacccctcagccccttctccttcacccttagtggcaagtcc

SEQ ID NO: 7400 - DNA, 92 bp, homo sapiens
tttacaatcctttagctagacacagagtgctgattggtgcgtttttacagagtgctaattgctgcatttacaatcctttagctagacccaga

SEQ ID NO: 7401 - DNA, 75 bp, homo sapiens
aatgccatcagttaaggcaggaacaggccattttcatttcttttgtggtggaatgccatcagttaaggcaggaac

SEQ ID NO: 7402 - DNA, 101 bp, homo sapiens
aatattctaaaagtatacaaataatcattataaaaaatcattataaaatcattttgcatttgcagaatattctaaaagtatacaaataatcattataaaaa

SEQ ID NO: 7403 - DNA, 71 bp, homo sapiens
tacacacacacacatttactttcaaatggaaatatccttcacaggatttacatacacacacacacatttac

SEQ ID NO: 7404 - DNA, 110 bp, homo sapiens
tacatgccattctgtatttgtagcacactttatacctcacatcaatattattgctgattacaatattaaacaattagctaattacatgccattctgtatttgtagcacac

SEQ ID NO: 7405 - DNA, 98 bp, homo sapiens
catggcaatatatattgttatatacattgttggaataatgttatattattgttgccatgcaacaatttatattgcatggcaatatatattgttacata

SEQ ID NO: 7406 - DNA, 104 bp, homo sapiens
ttgtatttgatttaaaaattatattcattaagataattcagcctaagtcaacatagaggaagcttagaagttgtatttgatttaaaaattatattcactaagat

SEQ ID NO: 7407 - DNA, 89 bp, homo sapiens
ccttagtggcaagtcccgctttcctggggcaggggcaagtacccctcaaccccttctccttcacccttagcggcaagtcccgctttcct

SEQ ID NO: 7408 - DNA, 81 bp, homo sapiens
tgtatgccctatgtaaatgaacaggctaaagtgaagttacaaagttatttactctgtgtatgccctatgtaaatgaagagg

SEQ ID NO: 7409 - DNA, 83 bp, homo sapiens
gggttccatcactggtggtgattcatgaatgagcctgtcgaggtttagtagcttacttcgggttccatcactggtggtgattc

SEQ ID NO: 7410 - DNA, 93 bp, homo sapiens
gattccagacccaccaaaactgagaattatagttttggttagattataattatagttttggtgggattccagaccaaccaaaactgagaatta

SEQ ID NO: 7411 - DNA, 80 bp, homo sapiens
gaaagtttggaacttcctagagacttagagatctcagaagacaggaacatgtgggaaagtttggaccttcctagagactt

SEQ ID NO: 7412 - DNA, 78 bp, homo sapiens
ctttttatcagaattataactttttatcagttataaatcaatgaagtaaatatgctttttatcagaattataactttt

SEQ ID NO: 7413 - DNA, 103 bp, homo sapiens
ggatcatgccattgcactccaggctgggtgacaagactgaaattccgtcaaaaaaaaaaaaaaaaaagtgagctgggatcatgccattgcactccagcctggg

SEQ ID NO: 7414 - DNA, 69 bp, homo sapiens
attcatttctttgtatgaatgattttcatagggtcaaacaaatctagccattcatttctttgtatgaat

SEQ ID NO: 7415 - DNA, 103 bp, homo sapiens
cacagttacctgcacagcatccccaaggaggctcactcacacggttacctgcacagcatccccaaggaggctcactctcaccgttacctgcacagcatcccca

SEQ ID NO: 7416 - DNA, 99 bp, homo sapiens
ttctaactccatgattcatttactatctataatacagaataagacccttttttttttttggcccttctttatacattctaactccatgattcatttact

SEQ ID NO: 7417 - DNA, 105 bp, homo sapiens
ataaatgtacaaatttggaggatagtttagtgtttgaattggggggatacttagaaataaatatacaaatttggaggataatttagtgtttgaattgggggatag

SEQ ID NO: 7418 - DNA, 71 bp, homo sapiens
ggatgtgagaccagtggcttcagcatcatctaaatagtcaatacagatggatgtgagaccagtggctttca

SEQ ID NO: 7419 - DNA, 63 bp, homo sapiens
tactggtgtggtttctactggtgtagaaactggtgtagatactggtgtagatactggtgtggt

SEQ ID NO: 7420 - DNA, 128 bp, homo sapiens
ggttgaattaactgcaaagggatataagaaaacattcttgggtgataaagacgtagtgacaaaaatctagactaatagttggccaaggctagggttgaactaactgcaaagggatataagaaaacatt

SEQ ID NO: 7421 - DNA, 90 bp, homo sapiens
tgggattacaggcatgagccacctcctgacctcaggtgatccacctgcctcagcctcccaaagtgttgggattacaggcatgagccactg

SEQ ID NO: 7422 - DNA, 105 bp, homo sapiens
gtgtgtgtgtgtgatgactttgtggaaagccttgagtaaagagctacggttgaagttaactgttaaggtgtgtgtgtgtgtgatgactttgtggaaagccttgag

SEQ ID NO: 7423 - DNA, 91 bp, homo sapiens
atcatgcatgagacatagaattaagctgtctgagaagtttatccaggattccttacccatcatgcatgagatatagaattaagctgtctga

SEQ ID NO: 7424 - DNA, 158 bp, homo sapiens
caccaatcggcactctgtatctagctcaaggtttgtaaacacaccaatcagcaccctgtgtctagctcagggtttgtgaatgcaccaatcgacactctgtatctagctactctggtggggccttggagaacctttgtgtggacactctgtatctagct

SEQ ID NO: 7425 - DNA, 98 bp, homo sapiens
tattatctgttttttcagatgtgtgctgtttttgatttttaattgctcttatttaccaaatgtcttattcattatattatctggtttttcagatgtgt

SEQ ID NO: 7426 - DNA, 143 bp, homo sapiens
aaaaaagttaagaaccaaagtgacttaaaatgtttcaatctccagatatttactgacagaggggtaggttttgttttgttttttgattgaaaagaagttaagaaccaaagtgacttaaaatgtttcaatctccagatatttac

SEQ ID NO: 7427 - DNA, 92 bp, homo sapiens
ttggaaatctccgtgaaaccttactgtgctccgtggccggaaaaaaaaaaaaaaaaagatacattggaaatctctgtgaaaccttactgtgc

SEQ ID NO: 7428 - DNA, 93 bp, homo sapiens
ttttcctaattgaataccctttatttgtacaatcatgtcatctgcaagcagacaatttgacttcctcttttcctaattgaataccttttattt

SEQ ID NO: 7429 - DNA, 100 bp, homo sapiens
ggaccagaaattctatgaaaatttcactgaagcttttgagatttgagtgttctcatccatcaaataagaaagtaggacaagaaattctatgaaaatttca

SEQ ID NO: 7430 - DNA, 90 bp, homo sapiens
aatggactaaaaatgcctgctaaatattaacgatttttgcttttagatggagtaatttttgaaatggactaaaaatacctgctaaatatt

SEQ ID NO: 7431 - DNA, 79 bp, homo sapiens
tttccttttcagatgaaggatattaggcccccattctactatcctaatatcctttccttttcagatgaaagatattagg

SEQ ID NO: 7432 - DNA, 133 bp, homo sapiens
tggatcacctgaggtcaggagttcaagaccagcctgggttggcccggtgcagtggctcatgactataatcctagcactttgggaggccaaggtgggtggatcacttgaggtcaggagttcaagaccagcctgg

SEQ ID NO: 7433 - DNA, 116 bp, homo sapiens
tgggaaatttatccattaatattaccacatgatcttttaaaatattaccaagaattctttatcctattaaaaaaacatttttgacaagtgggaaatttatccattaatactaccac

SEQ ID NO: 7434 - DNA, 113 bp, homo sapiens
cctccagaataaaacataggggaaaatctcctggatattggcaattcaagaccagatataagaccagaaactataaaacctccagaataaaacataggggaaaatctcctgga

SEQ ID NO: 7435 - DNA, 120 bp, homo sapiens
tcaagttggtgtttggattaaaaaaaagaaaaaaaaaagtcaaccaaaggacataggtgttgctgatagctaatgactgccctcaagttggtgtttggattaaaaaaaggaaaaaaaaaa

SEQ ID NO: 7436 - DNA, 82 bp, homo sapiens
agcttcttcctcttgatgttgtacttattatcaccatgtcatgtgtctttaggtcacagcttcttccccttgatgttgtact

SEQ ID NO: 7437 - DNA, 160 bp, homo sapiens
cttgtgatggcggctggcattttgctcactccttgtaccccttaggtaagaagtctctcaatagcaaagcatttcttttaaaaaatgaaaaaaatagcctcactctttcttgtgatggtggctggcattttgctcactccttgtaccccttaggtaagaa

SEQ ID NO: 7438 - DNA, 90 bp, homo sapiens
aacatgtaagaccccatctattaaaaaaaaaaaaaactaataacatatgcattccagcctgggcaacatgtaagaccccatctcttaaaa

SEQ ID NO: 7439 - DNA, 75 bp, homo sapiens
gttcctgccttaactgatgacattccaccacaaaagaagtgaaaacggcctgttcctgccttaactgatgacatt

SEQ ID NO: 7440 - DNA, 105 bp, homo sapiens
aggacataggcttgggcaaagacttaaacataagacctaaaccataaaaaccctagaagaaaacctaggcaataccattcaggacataggcatgggcaaagactt

SEQ ID NO: 7441 - DNA, 72 bp, homo sapiens
gagtgggagggagtggtgcccagaagctttttctctcttgttgctcggcgagtgggagggagtggtacccag

SEQ ID NO: 7442 - DNA, 89 bp, homo sapiens
tcaataatataactgtcgcaacttactgagtttgttatttatttaaaaatgaaagaaaaaatcttcaataatataactgttgcaactta

SEQ ID NO: 7443 - DNA, 89 bp, homo sapiens; identical to SEQ ID NO: 7442

SEQ ID NO: 7444 - DNA, 50 bp, homo sapiens
ggaaatgtttggaacttcctagagagggaaagtttggaacttcctagaga

SEQ ID NO: 7445 - DNA, 81 bp, homo sapiens
tctctaggaagttccaaactttcccacatcttcctgccttcttctgagccctccagttctctaggaagttccaaacatttc

SEQ ID NO: 7446 - DNA, 77 bp, homo sapiens
tgttgtacttagaaataaatatgtacttagaaataaatattagaaatatttattgttgtacttagaaataaatattc

SEQ ID NO: 7447 - DNA, 96 bp, homo sapiens
ctgattggttgctttccacaatcagtcagatgtttgcatgggagtctgacctttgcaacttcatttcagctgctgattggttgctttccacaacca

SEQ ID NO: 7448 - DNA, 100 bp, homo sapiens
tcacaaagataacctatggatgtcaaaagataattgtttttatgtcaaaagataattgttttatggatcacaaagataacctatggatgtcaaaagataa

SEQ ID NO: 7449 - DNA, 300 bp, homo sapiens
taatttaagtcttctctcctttttccttagtctatttagcatttctgattttactaatttaagtcttctctcgttttttcttagtctgtttagctaaagatctggtaattttgttgatctttttgacagaatcacctcaatttatttatttttctcttttttctattctctattttgtttatttctgctttaatcttcattattttcttttttctgctagttttaggtttagtttgttcttctctttctagttccttaagtgtaatgttagattgttgatttaagacttttcttgttttg

SEQ ID NO: 7450 - DNA, 145 bp, homo sapiens
ctgtaataaaaccaacaataacagtacattattgaatctgttaagatgctgttagatgtttctatgaaagatctaacatttgagatgaaacttaaaattcaactgtaataaaaccaacaataacagtacattattgaatatgtta

SEQ ID NO: 7451 - DNA, 98 bp, homo sapiens
tcttccatactattttatttgttaccatgtattatttgttactgagtaagctcttccatacttagtaagttcttccatactattttatttcttaccat

SEQ ID NO: 7452 - DNA, 73 bp, homo sapiens
ccttgggcaaatggcataattcttgcatgccttagtttcctctccatttccttgggcaaatggcctaattctt

SEQ ID NO: 7453 - DNA, 185 bp, homo sapiens
ttagataaataccaaagaaatagaaggacattaaataaaagcaaaactgtctcaaaaaaaaaaaggacgttagataaataccaaggaaatagaaggacattaaataaaaaggacattagataaataccaaggaaatagaaggacattagataaataccaaggaaatctgaataaagtatagactt

SEQ ID NO: 7454 - DNA, 87 bp, homo sapiens
ctttccatgttcatatttatatttgtatagacatatatatatatacacatatactactttcctttccattttcatatttatatttgt

SEQ ID NO: 7455 - DNA, 104 bp, homo sapiens
aagactccagggtcatgtttaattcttttttcctttaacctcctggtttgtgagctccaaacaggttaaagactccagggtcatgtttaattcttttttccttt

SEQ ID NO: 7456 - DNA, 132 bp, homo sapiens
cctcccaaagtgctgggattacaggcatgagccaccttgcctagccaaagactatttttttttcttttctttttgagatagatccgcccacctcagcctcccaaagtgctgggattacaggcgtgagccacc

SEQ ID NO: 7457 - DNA, 158 bp, homo sapiens
caccaatcggcactctgtatctagctcaaggtttgtaaacacaccaatcagcaccctgtgtctagctcagggtttgtgaatgcaccaatcgacactctgtatctagctactctggtggggactaggagaacctttgtgtcaacactctgtatctagct

SEQ ID NO: 7458 - DNA, 115 bp, homo sapiens
agaattaatgtcttcctcaatacatagaagggagagattcctcaatatatagaagggagagattaattctcccaccagaattaatctcttcctcaatacatagaagggagagatt

SEQ ID NO: 7459 - DNA, 86 bp, homo sapiens
ccaacactctgcttattaaaaaaattacttatttatttatttattagaagaccaagacactgccaacactctgcctattaaaaaaa

SEQ ID NO: 7460 - DNA, 115 bp, homo sapiens
ttaagtgtcatacacacacacacacgcgcgcgcgcgcgcgcgcgcgcgcgcacacacacacacacacacacacacacacacacacacacacacacacacacacacacacacacac

SEQ ID NO: 7461 - DNA, 95 bp, homo sapiens
gccattatcctgcctcagcctcccgactagctgggactacaggcgcccaccaccgcctcccgggttcacgccattctcctgcctcagcctcccga

SEQ ID NO: 7462 - DNA, 90 bp, homo sapiens
cagattcaattctaaatagagaagttgagagtgtcagaggggaggaggtctagttatcttcagattcaattctaaatagagaagtggaga

SEQ ID NO: 7463 - DNA, 128 bp, homo sapiens
actgacctttgtgtttacctatgtagagttctgtatttcttcatgtcagaggattcacaaacaaaaatatacgtgagatactgacctttgtgtttacctatgtagagttctgtatttcttcatgtcag

SEQ ID NO: 7464 - DNA, 109 bp, homo sapiens
gtgtagccatcaccacaattttagaagatataattcatatgctatacaattcaaagtattcagtgtttttagtatactcagacgtgtagccatcaccacaattttagaa

SEQ ID NO: 7465 - DNA, 122 bp, homo sapiens
tttttttgtagagacagggtgtcaccatgttgtccatgtagctgagactataggcacgtgccaccgtactcaactaatttttccgatttttttgtagagacagggtctcaccatgttgtcca

SEQ ID NO: 7466 - DNA, 114 bp, homo sapiens
tcaacaattcagtgagagaggatgcagcaacaaagactgtaacgaaaaaacaagagagtctagggtctcacatcaacaattcagtgaaagaggatgcagcaacaaagactgtaa

SEQ ID NO: 7467 - DNA, 97 bp, homo sapiens
aaaaagacctagtctttttcatatccagaggcacctgacttagaaaaaaaaataagtcaaaataaaaaataaaaaaaagacctagtctttttcatat

SEQ ID NO: 7468 - DNA, 115 bp, homo sapiens
aaaccccgtttctaccaaaaatataaaatattagcgggtgttggagctcaggagtttgagaccagcccaagcaacctggcaaaaccccgtttctaccaaaaatacaaaatattag

SEQ ID NO: 7469 - DNA, 79 bp, homo sapiens
tcaacctcacccttattcccctccccgctacaggagcccctaagtcattagggctcaacctcacccttattcccctccc

SEQ ID NO: 7470 - DNA, 92 bp, homo sapiens
ctgagactctgtcaaaaaaaaaaaaaaagaaaaaagaaaaagaaagaaaacatactgaaatcatactgagactctgtcaagaaaaaaaaaaa

SEQ ID NO: 7471 - DNA, 263 bp, homo sapiens
gcagaggcgctcctcacatcccagacggtggaggggccgggcagaggccctcatcacttcccacacggtgagggggccgggcagaggtgctcctcacttcccagacagggctgcggccagagagaggcactcctcacttcccagatggcagggggcgctgagcagaggtgctcctaacttcccacacgcggtggcagctgcgcagaggcgcttctcacctcccagatgggcggcggccgggcaaaggtgctcctgcttcccag

SEQ ID NO: 7472 - DNA, 352 bp, homo sapiens
tagaggaaagaaaaagaaagaaagaaagaaagaaagaaagaaagaaagaaagaaagaaagaaagaaagaaagaaagaaagaaagaaagaaagagagagagagaaagagagagaaagagaaaggaggaaaggaagaaagaaagaaggaaggaaggaaggaatgaaggaagaaaaagaaagagagagaaaggaggaaaggaagaaagaaacaaagaggaaagaaggaagaaagaaagataggaaggagagaaagaaagaaaaaagaaagaaaaaagaaaggaaggtaggaaggaaggaaggaaagaaagaaaaagaaaagaaaagaaagaaagaaagaaagaaagaaagaccat

SEQ ID NO: 7473 - DNA, 104 bp, homo sapiens
atgggccagtcctggaaatgacactcattcctgctggtatttcactgaccagagctcggtcactaggaaggctgggttttatgggccagccctggaaatgacac

SEQ ID NO: 7474 - DNA, 132 bp, homo sapiens
tctgtgaaggaggcagtccaagggaccagcaggaggatttgtagctggtgtgtgtgtgtgtgtgtgtatgtttgtgttttgtgtcagtatgtctgtgaagcaggcagtccaagggaccagcaggaggatttg

SEQ ID NO: 7475 - DNA, 99 bp, homo sapiens
ttgttgttgctattgttagcaattagagctacagtgtctaaagtatctgttattagatctaaagtatctattttgttgttgttattgttagcaattaga

SEQ ID NO: 7476 - DNA, 204 bp, homo sapiens
ctgcagagaggaactaccctctctgctgacagctggacacttatcaggagacctgcctgcagagaggagctaccctctctgctgagagctgaagagaagatgggccaaccagctgcagagaagagaggagctaccttctctaccgaacacggaacactccttgggacgacctgcccagcagagaggagctaccctccctgctga

SEQ ID NO: 7477 - DNA, 80 bp, homo sapiens
gggaaagtttggaacttcctagagacttggagggcttagaagacaggaagatgtgggaaagtttagaacttcctagagac

SEQ ID NO: 7478 - DNA, 99 bp, homo sapiens
gagagagagaaagtgtgtgtgtgtgtgtgtgtgtgtgtgtgtgtgtgtgtgtgtgtgtgtgaaagagagagagaaagtgtgtgtgtgtgtgtgtgtgtg

SEQ ID NO: 7479 - DNA, 135 bp, homo sapiens
tactgcattatatgatgtttcctttgcctggacatctggtcccatttggcctggccctttggtctcagctgccctgacccctctaaagtttactgcattatatgatgtttcctttgcctggacatctggtcccat

SEQ ID NO: 7480 - DNA, 95 bp, homo sapiens
ataataggtagtcttttgtgaatggctgctttctattctggacattgtatataagtaaaatcataataggtggtcttttgtgaatggctgctttc

SEQ ID NO: 7481 - DNA, 142 bp, homo sapiens
ggaggggagcggaggggaggggaggggaagggaggggaggggaggggaggggaggggaggggaagggaaaggaaaggaaaggaaaggaaaggaaaggaaaggaaaggaaaggaaaggaaaggaaaggaaaggaaaggaaagg

SEQ ID NO: 7482 - DNA, 92 bp, homo sapiens
tacttaaaaaggacccaaaagaatactgtaatatcgtaaggccgggtgcggggaagagaaaaaaaaatacttaaaaaggaccaaaaagaata

SEQ ID NO: 7483 - DNA, 103 bp, homo sapiens
aaggaaagaaaggaaagaagaaagaaagaaaaagaaagaaagaaaagaaaggaaggaagggaggaaggaaggaagaaaggaaggaaggaaggaaggaaggaag

SEQ ID NO: 7484 - DNA, 77 bp, homo sapiens
tctgtcccattagaatgtaagctaattagaattctgtcccactagaattccaattctgtcccattagagtgtaagct

SEQ ID NO: 7485 - DNA, 95 bp, homo sapiens
taaaaatacaaaaattagccaggcatggtggcgcgtgactttgctgtggaagcaaggtctattataaaaatacaaaaattggccaggcatggtgg

SEQ ID NO: 7486 - DNA, 103 bp, homo sapiens
tcttatggttgttttatatatagtataaaaacaaccatatacataataaaaatacacataataaaatatttaaaaaatcttatgtttgttttatatatagtat

SEQ ID NO: 7487 - DNA, 89 bp, homo sapiens
catatggtacatgtgcttacaagcaggaagctattgtgtatatataagtgttatgtatttacgcatatggtacatgtgcctacaagcag

SEQ ID NO: 7488 - DNA, 148 bp, homo sapiens
gtccagtgaaaggtaaaaaatgagtttgttagatttcaaaatcagtcaaaaggtaaaatcagtgtgaagataagataccatcttatctaactggacctttagtccagtgaaaggtgaaaaatgagtttgttagatttcaaaatcagtc

SEQ ID NO: 7489 - DNA, 93 bp, homo sapiens
atatatttacatatccagaggaagttgttatacaactatctagaggaagctatatatacttatataagatatatttacatatctagaggaagt

SEQ ID NO: 7490 - DNA, 201 bp, homo sapiens
tcctctctgcagagagctgaggagacaatgagattgcaagctgcagagaggagctcccctctctgctgagagctggacactcgtctagatgacctacctagcagaaaggagctaccctctctgctgagagctgaacactcatcagaatgacctgcctagccaagggaaactgccctctctggtgagagctgaacactcatc

SEQ ID NO: 7491 - DNA, 239 bp, homo sapiens
atatacaattattaataatatataattctgttgtatataactgattatattaattatataattatatattgcatatataattaaataaatgcaattaattatatattatagattacatatataattaaataattatatattacatattacatatgcttaaacatctataattatatattacatatatacaattatatacatttatataattccaatcataattatatattacatatata

SEQ ID NO: 7492 - DNA, 93 bp, homo sapiens; identical to SEQ ID NO: 7489

SEQ ID NO: 7493 - DNA, 111 bp, homo sapiens
catcacctcaagcatttatcatttctttgtgttggaaacattccaatttcactcttggtaaatggagtatccatcacctcaagcatttatcatttctttgtgttagaaaca

SEQ ID NO: 7494 - DNA, 77 bp, homo sapiens
gcctcatcaattacagatgggtttccctgaggtcagggttctcaatagcagtggcctcatcaatcacagatgggttt

SEQ ID NO: 7495 - DNA, 89 bp, homo sapiens
tgtgatctttgttggacccttatcagtggttctgctttttccctttgtcctgttctctcagaagcatgtgatctttgttagacccttat

SEQ ID NO: 7496 - DNA, 85 bp, homo sapiens
attagtttattagaataaactaataaatttattagttttagtttaatttattattctaataaattagtttattagaataaactaa

SEQ ID NO: 7497 - DNA, 109 bp, homo sapiens
tggggtgtaaaaacctcaggggctaccaccggaagagatctaccccactctttcctcaagtgcattgccctggggtgtagaaacctcaggggctaccaccggaagagat

SEQ ID NO: 7498 - DNA, 129 bp, homo sapiens
gggaagtgataaatgtccatgaaatcttcacaatttatattcagagatggcagtaaagacaggcataagaaattataaaagtattaattttgggaactgataaatgtccatgaaatcttcacaatttat

SEQ ID NO: 7499 - DNA, 90 bp, homo sapiens
tttacaatcctttagctagacacagagtgctgattagtgcgattttacagaatgcttattggtgcatttacaatcctttagctagacaca

SEQ ID NO: 7500 - DNA, 117 bp, homo sapiens
caatcccttagctagacataaagattctccaagtccccaggagattagctagatacagagtgcccattggtgcatcgacaatcccttagctagacataaaggttctccaagtcccca

SEQ ID NO: 7501 - DNA, 130 bp, homo sapiens
ccttatccattcaggatgcattatatatatacacacacatacacacacacacacacacacacacacacacacacacacatatatgcacaccttatccattcaggatgcattatatataaacacacacata

SEQ ID NO: 7502 - DNA, 71 bp, homo sapiens
ttgtttagtttataagcatttctgtaaaaattccacttctgattctttttgtttagtttataagtatttct

SEQ ID NO: 7503 - DNA, 79 bp, homo sapiens
aaccctgtaacaaccgggatattttaagaagtttaagttgagtactgtgggagcaaccctgtaacaacagggatatttt

SEQ ID NO: 7504 - DNA, 209 bp, homo sapiens
aggagtgtaacttgtaacttcacctcatcctctgattggttgctttccacaaccaatcagactgattgcaggccaaagtcttcgtttgcataggagtgtaactttgtaacttcactttagcctctgattgcaaagtgtaactttgtaacttcactttagtctctggatgtggagtgcaactttgtaacttcactttagcctctgattgc

SEQ ID NO: 7505 - DNA, 100 bp, homo sapiens
aagtgtaaagtagctgattaatgggtagttgaggggtgtgggggttcggaagggataagtttgcagagagatggggaaagtgtaaagtaactgattaatg

SEQ ID NO: 7506 - DNA, 98 bp, homo sapiens
taacctaattttagaatttatcaacccaacttattttttttttttgcagttaggacccctgagttaatctaatgtaacctaattttagaatttatcaa

SEQ ID NO: 7507 - DNA, 132 bp, homo sapiens
aaatatcaatgctgatagctacaggtaattgcttatagtagaaatttaacctaccatcaagcggatgtcaaaaagaggcaatgaaatatcaatgctgatagctacaggtaattgcttatagtagaaatttaa

SEQ ID NO: 7508 - DNA, 124 bp, homo sapiens
gatatttctagaaaggcttatattttcctcaaaaatttaactacacttgttgaaagagaagagtttaaacccagagttctgttctgatatttctagaaagggttatattttcctcaaaaattta

SEQ ID NO: 7509 - DNA, 95 bp, homo sapiens
cagagttaccagagtgataaggagaacacagacatttactttccttattccttgccttgtcttcttcagagttaccagagtgataaggagaacac

SEQ ID NO: 7510 - DNA, 148 bp, homo sapiens
actatatttatctgtaataaatatatttatatttttactgtaggtaatgatatacacactatatttacctatagtatatagcatttactatgccatatttacccatggtatatagtatttactatactatatttacctatagtaaata

SEQ ID NO: 7511 - DNA, 140 bp, homo sapiens
tgttgtgaaaaatgggtattctgtagctattacgtagaatgttctgtaaatctctacttggcctaacacgtgatctattcttgataaagttccatgtcctgttgtgaaaaatgggtattctgtagctattacatagaatg

SEQ ID NO: 7512 - DNA, 111 bp, homo sapiens
ttctgaaaaatcaaatattttaatactgtaatgttatttttttgcccattttacccagaaacacaaagattgtgtcttaaaaaaattctgaaaaatcaaatatttcaatac

SEQ ID NO: 7513 - DNA, 74 bp, homo sapiens
cttagaactacctgtgaacactgtgtgacttcatttctttaagcaataaaccttagaactacctatgaacactg

SEQ ID NO: 7514 - DNA, 75 bp, homo sapiens
tcagttaaggcaggaacaggccattttcactttttttgtggtggaatgtcatcagttaaggcaggaaccggccat

SEQ ID NO: 7515 - DNA, 113 bp, homo sapiens
tggtccatgcattgtcctttcttttccagtcacattgtcaatcattgatgagccctatgcttgaacatacatttgtttggtgcagtggtccatgcattgtcttttcttttcca

SEQ ID NO: 7516 - DNA, 99 bp, homo sapiens
tgtcatatggttgtgaaaagagcatggattccagaatcagacagacctgaattcacagtgtgagtcatacgaagatatcatatggttgtgaaaagagca

SEQ ID NO: 7517 - DNA, 96 bp, homo sapiens
ggatggggaaaaacagaccttgagtccccaagcaagaaagtccagtttaaaaaaaaaaaaaaagaatttgcaggatgaggaaaaacagaccttgag

SEQ ID NO: 7518 - DNA, 125 bp, homo sapiens
gaacataaattgtgaagatttcatggacatttattagctccccaaattaatacttttataatttcttatgcctgtctttactgcaatctctgaacataaattgtgaagatttaatggacatttat

SEQ ID NO: 7519 - DNA, 88 bp, homo sapiens
agaaacaaaatgaaataaaggctttcagatgagattgggcacattcagggtggtatagggctgtagacacaaaatgaaataaaggctt

SEQ ID NO: 7520 - DNA, 77 bp, homo sapiens
tttcccacatcttcctgtcttctgagccctccaagtctctaggaagttccaaactttcccacatcttcctgtcttct

SEQ ID NO: 7521 - DNA, 115 bp, homo sapiens
gtatccttatgagaagagattaggacacacacacacacacacagacacacacacatgtggaagaatatgaccgtatccttataagaagagattaggacacacacacacacacaca

SEQ ID NO: 7522 - DNA, 78 bp, homo sapiens
agaagacaggaaaatgtgggaaagtgggaacttcctagagacttggagggctcagaagacaggaagatgtgggaaagt

SEQ ID NO: 7523 - DNA, 110 bp, homo sapiens
aaatcaatttaagggtcatgaccagcacttttgttttttgaaccagggtcagcaccgttgcccagtctggagagggcaaaatcaatttaagagtcatgaccagcactttt

SEQ ID NO: 7524 - DNA, 97 bp, homo sapiens
aaccatgtcagattgtcccccaacccccatctgtacgtgagctcaatgctatctcattggcgcaaaccatgtcagattgtccctcaacccccatctg

SEQ ID NO: 7525 - DNA, 93 bp, homo sapiens
ctacccacaatgctgtgctctcctacccataatgcctgctcttctacccacaatgcctgctctcctacccacaatgctgtgctctcctaccca

SEQ ID NO: 7526 - DNA, 83 bp, homo sapiens
ttttaaaaggaatataataaaaaatggaaaacactagtatatttaaagatttaaatagtcttttaaaaggaatataatcaaaa

SEQ ID NO: 7527 - DNA, 128 bp, homo sapiens
aaattgtgaagatttcatggacatttatcagttcccagagttaatacttttataatttcttatgcctgtcttaactgcaatctctgaccacaaattatgaagatttcatggacatttatcagttccca

SEQ ID NO: 7528 - DNA, 93 bp, homo sapiens
tttaacctaacctgtagtaaaaaaggaagacgaccattcagatttcttcctgttttaaaattatttaacctgacctgtagtaaaaaaggaaga

SEQ ID NO: 7529 - DNA, 252 bp, homo sapiens
caccaatcagcactctgtgtctagctcaaggtttgtaaacgcaccaatcagcaccctgtgtctagctcaaggtttgtaaacacaccaatcagtgctctgtgtctagttaatctagtggggacttggagaacttttacgtctagctagaggattgtaaatacaccaatcagcactctgtgtctagctccgggattgtaaacgcaccaatcagcaccctgtcaaaacggaccaatcagctctctgtaaaatgga

SEQ ID NO: 7530 - DNA, 75 bp, homo sapiens
aaattagcctggcatggtggcatgcgcctgtactaaaaatacaaaatacaaaaattagcccggcatggtggcatg

SEQ ID NO: 7531 - DNA, 82 bp, homo sapiens
ctctccaattttacccagctctaagattcaacactaaggtttatccaagatggactctccaatttttcccagctctaagatt

SEQ ID NO: 7532 - DNA, 149 bp, homo sapiens
catggtggcacatgcctgtagtcccagctacttgggaggctgaaatgagaggatcacttgagcccaggaggcagaggttgcagtgatcgaggatcatggtggcacatgcctgtagtcccagctacttgggaggctgaaatgggaggatc

SEQ ID NO: 7533 - DNA, 82 bp, homo sapiens
gaagctcaggacggactctgtgactcctggtaccggcttagagctctgtatcccaaaaagaagctcaggatggactctgtga

SEQ ID NO: 7534 - DNA, 135 bp, homo sapiens
taaacacaccaatcagtgctctgtgtctagctaaaggtttgtaaatgcaccaatcagcactctgtaaaaacacaccaatcagtgctgtgtctagctaaagatttataaatgcaccaatcagcactctgtaaaaac

SEQ ID NO: 7535 - DNA, 105 bp, homo sapiens
ctagaggaggagatagacaaacatgtaaccttaaatacaaagacaaagtcagtgccctaacttgccctagaagaggagatagacaaacatgtaaccttaaataca

SEQ ID NO: 7536 - DNA, 87 bp, homo sapiens
cacaaccggctaaagatcacttttttaaaaggccagtgattacaggtgtgcaccaacacaactggctaaagatcacttttttaaaag

SEQ ID NO: 7537 - DNA, 106 bp, homo sapiens
aactttgtaacttcacttcagcctctaattagttgcagacagacagattgcgaaccaagtcttcatttgcatagaagtgcaactttgtaacttcactttagcctct

SEQ ID NO: 7538 - DNA, 157 bp, homo sapiens
gcccttcccctcccatcagcaaggcccagagaccagccctttcccctcccatgagcaaggcccagagaccagccctttcccctctcatcagcaaggcccagagaccagcccctttcccctcccatgagcaaggcccagagaccagcccttcccctcc

SEQ ID NO: 7539 - DNA, 99 bp, homo sapiens
ccaaggtagggcacatttctgggcaggaaagatataaatcacagataaaggaatacttctgtgatgccctttgccaaggtaggggcacatttctgggca

SEQ ID NO: 7540 - DNA, 100 bp, homo sapiens
acaggtgagatcactgggatatgtggctaagatatatgctccaggatgaggtggacttttgagctgggtatgtaacaggcgagatcactgggatatgtgg

SEQ ID NO: 7541 - DNA, 102 bp, homo sapiens
ccaaaacaaaaattcagctctcctgatatgcagacctaggttgtactgcaagtttgggatataaccaaaacaaaaattcagctctcctgacatgcagaccta

SEQ ID NO: 7542 - DNA, 125 bp, homo sapiens
tatttttagcagagacggggtttcatcatgttagccaggctggtctcgtgcctgccaccacgcctggctaattttcatatttttagtagagacggggtttcatcatgttagccaggctggtctcg

SEQ ID NO: 7543 - DNA, 69 bp, homo sapiens
attagataataatgtatgcaaatttatctaatttaataattagataatatctaataatgtatgcaaaat

SEQ ID NO: 7544 - DNA, 117 bp, homo sapiens
ttccaagtgtgcttaaaaagaatgtgtattctgcctcaacttgttttattgcttagaatacaacctatccttgagaatcttccaagtgtgcttgaaaagaatgtgtattctgcctca

SEQ ID NO: 7545 - DNA, 116 bp, homo sapiens
ggagctcctcagaaggagcctggagtgcctgcggaggggatgaagcccccccccaaccccactgacaatggagcactcggagctcctcagaaggagcctggagtgcctgcggaggg

SEQ ID NO: 7546 - DNA, 119 bp, homo sapiens
acactacacatcaggtctgtttccccccagagccagtcattaaatggcagcgtttacaccaggggagtgggcagacactacacatcacgtctgtttccccccagagccagtcattaaat

SEQ ID NO: 7547 - DNA, 61 bp, homo sapiens
ttcttttctctttcttcctttctttctttctttctctttctttctttctttctttctttct

SEQ ID NO: 7548 - DNA, 83 bp, homo sapiens
ttccttgtgcatcctttaataaggatgttatttaataaggatctttaataaggatctctttccttgtgcatacctttaataag

SEQ ID NO: 7549 - DNA, 85 bp, homo sapiens
cagcctctctaattctaatccaaacccaaaaatttgacaagcactagttgcctctatgccagcctctccaattctaatccaaacc

SEQ ID NO: 7550 - DNA, 75 bp, homo sapiens
aatgtcatcagttaaggcaggaacaggtcattttcacttcttttgtggtggaatgtcatcagttaaggcaggaac

SEQ ID NO: 7551 - DNA, 108 bp, homo sapiens
acacatactgttgaccaagaaattgtatattttataataaaagggcttttttataataatttaaaacacacacatactgttgaccaagaaattgtatattttgtaata

SEQ ID NO: 7552 - DNA, 92 bp, homo sapiens
ctataaaataggggatagaatatataataggggatataataggatataaatatatatcctatcatataaaatagaggatataataggataca

SEQ ID NO: 7553 - DNA, 101 bp, homo sapiens; identical to SEQ ID NO: 5996

SEQ ID NO: 7554 - DNA, 113 bp, homo sapiens
ctgggtctccccagcacaagagcagaaaaaagaataatgcacacacctctccagaaccccaaaaactgagcccaggagcctgggtctccccagcacaagagcagaaaaaagaa

SEQ ID NO: 7555 - DNA, 94 bp, homo sapiens
ggggaaaggacagtggggagttttacagaatgagaagagcgcttacccctgacacgggcggggcactgacggggaaaagacagtggggagtttt

SEQ ID NO: 7556 - DNA, 122 bp, homo sapiens
tgtacacacatatgtatgtcagtaattggcctcggaaatgcaaatcaaaatcacaataatacagcatggatccctgcatacacatactgtgtacacacatatatatgtcagtaattggcctc

SEQ ID NO: 7557 - DNA, 62 bp, homo sapiens
gcactggtgtctgttggtgtgagcctcccagctcagactgcactgctgtctgttggttgact

SEQ ID NO: 7558 - DNA, 318 bp, homo sapiens
ttgtaaatacaccaatcagtactctgtgtctagctcaaagtttgtaaacacaccaatcagcaccctgtatctagctcacggtttgtaaatacaccaatcagcactctgtatctagctcaaagtttgtaaacacaccaatcagcaccctgtatctagctcaaggtttgcaaatgcaccaatcagtgctctgtgtctagctgatctcacggggacttggagaacttttgtgtctagctcagggattgtaaacgcaccaatcagcaccctgtcaaaacggaccaatcagctctctgtaaaacagaccaattggctctctgt

SEQ ID NO: 7559 - DNA, 62 bp, homo sapiens; identical to SEQ ID NO: 7557

SEQ ID NO: 7560 - DNA, 73 bp, homo sapiens
gccagacccccaggacacagagaaccagcagtggctgcttccccggtccggccagacccccaggacacagaga

SEQ ID NO: 7561 - DNA, 101 bp, homo sapiens
ctcttgttgccgatgctggagtgcagtgtgtgtgtgtgtgtgtgtgtgtgtgtgtgtgtgtgacggagtttcgctcttgttgccgacgctggagtgcagtg

SEQ ID NO: 7562 - DNA, 109 bp, homo sapiens
ctttcttgtgttactccaagtccctgcccccatatgtcacagagagactcttcccacccacgtgtcacaccaagtcgcctttcttgtgttactccaagtcccttccccc

SEQ ID NO: 7563 - DNA, 73 bp, homo sapiens
gagaattaatatgaatcttttttcttttcaaactcagaaattcttactaagagaattaatataaatctttttt

SEQ ID NO: 7564 - DNA, 94 bp, homo sapiens
gaggtcaggagttcgagaccagcctgcccaacgtggtgaaaccccgtctcgccgaggcaggtggatcacgaggtcaggagttcaagaccagcct

SEQ ID NO: 7565 - DNA, 96 bp, homo sapiens
tggtggctcatgcctgtaatcccagcactttgggaggccgaggcgggcggatcaccaaattagccgggcatggtggcacatgcctgtaatcccagc

SEQ ID NO: 7566 - DNA, 91 bp, homo sapiens
ccagcactttgggaggccgaggcgggtgggtcacctgaggtcgggggttcaagaccagcctgaccattccagcactttggggggccgaggc

SEQ ID NO: 7567 - DNA, 123 bp, homo sapiens
tcacaaggtcaggagttcaaaaccagcctggccaaaatggtgaaaccctgtctctatcccagtactttgggaggctaaggtgggtggatcacaaggtcaggagttcaagaccagcctggccaa

SEQ ID NO: 7568 - DNA, 88 bp, homo sapiens
gtccttgaggatgggatggcctatgtcacacactttgtccttgaacctgagtgatgggggtccttgaggatgggatggcctgtgtcac

SEQ ID NO: 7569 - DNA, 92 bp, homo sapiens
ggccccctctccttcatctgtatccaggcacgtgcctcgtgacagaagccttcccagaccccggccccctctccttcatctgcatccaggca

SEQ ID NO: 7570 - DNA, 94 bp, homo sapiens
catgtcctcattgcagagacctatacagttcacgcagaaatggagacaggagcatcacccaaatccatcttcatgtcctcattgcagagaccta

SEQ ID NO: 7571 - DNA, 72 bp, homo sapiens
aggccaggggcctggagggccagggggctgcaggggccaggggactgcagggaccgggggctggagggaccc

SEQ ID NO: 7572 - DNA, 103 bp, homo sapiens
gctgcagccagaaacaggaggggcaggctcactggacaccacctcccaggcgacccccgcccccaggctgcagccagaaacaggaggggcaggctcactggac

SEQ ID NO: 7573 - DNA, 99 bp, homo sapiens
catcttgagtgagggctggaaaatgatgtgctcgcccgtaggattgtcagaggcgttcgaaccagagcgacttcatcttcagtgagggctggaaaatga

SEQ ID NO: 7574 - DNA, 81 bp, homo sapiens
ggtcccaccttcctgccccatggctggtcccctgggcaagggggaagcagcagctccggtcccaccctcctgccccatggc

SEQ ID NO: 7575 - DNA, 110 bp, homo sapiens
ctcgccgggcccccctgctcagatggtgattccatccctccctccatcaggtgtgtctgtgtattcacgtctcgccgggcccctctgctcagatggtgattccatccctc

SEQ ID NO: 7576 - DNA, 104 bp, homo sapiens
caaaccattgatgcgtgactcaacacacaccctcagcgtgctgaaggactaccgactgccacgccacaacacaaatgagcaaaccattgatgcgtgactcaaca

SEQ ID NO: 7577 - DNA, 95 bp, homo sapiens
gcccaggagttcaagaccaggctgggcaacatagcaagacaccattctctacaaaaaataaagagcccaggagttcaagaccagcctgggcaaca

SEQ ID NO: 7578 - DNA, 101 bp, homo sapiens
ggtggacatttggattgttcaccaggttcaccagcccgatcgctgcagcctgatctcccaatgagcatggtggacatgtggattgttcaccaggttcacca

SEQ ID NO: 7579 - DNA, 81 bp, homo sapiens
tggcgacctcccaggccttcgcatccacacacacgtccacccctacgcggcggtgcgtggtgacctcccaggccttcgcat

SEQ ID NO: 7580 - DNA, 117 bp, homo sapiens
tggctggaagcaccctccctggtcactcaggcagccctgcagggctgtgagctctgcccccaaccctgaggtgtctgcgtggctggaagcgccctccctggtcactcaggcagccct

SEQ ID NO: 7581 - DNA, 89 bp, homo sapiens
atctataaagctattttccatccattcatccttcttccatctatccatccatccattcacccatccatctataaagctattttccatct

SEQ ID NO: 7582 - DNA, 84 bp, homo sapiens
gttctgtctcctccaggcccggccctgccatgtgagcagggagcttccccatgggactgatgttctgtctcctccaggcctggc

SEQ ID NO: 7583 - DNA, 89 bp, homo sapiens
ataagggtctaacaaagatcacatgcttctgagggaacaggacaaagggcaaaagcagaaccactgataagggtccaacaaagatcaca

SEQ ID NO: 7584 - DNA, 84 bp, homo sapiens
ggggttagggccggggcaggggtgtagctggctctcggggaagcatgggaaggaggcacaggggttagggccggggcagggggg

SEQ ID NO: 7585 - DNA, 102 bp, homo sapiens
gctgccctctcagaagaggtcctcatgtttagaaagtgtattttagctgtgctggtcattgcatgtgcaggataaaacttctgccctctcagaagaggtcct

SEQ ID NO: 7586 - DNA, 110 bp, homo sapiens
agcaaatattcaacaaatcaacctgaataaaatagtcggttagggatttagtacatggcacagcttaaagaactggcctttagcaaatattcaacaaatcaaccttaata

SEQ ID NO: 7587 - DNA, 160 bp, homo sapiens
ggagggctgcctgtgtcaccctctgccattcctccatattaaacagggtcaaatatgcatatgtctgggcattaactgtgtctgcaggtgcattagttttagccactggagggctgcctgtgtcactctctgccattcctccatattaaacagggtcaaa

SEQ ID NO: 7588 - DNA, 77 bp, homo sapiens
tggaaaaggaaatatcttcaaataaaaactacacagaagcattctgagtccctattttggaaaagaaaatatcttca

SEQ ID NO: 7589 - DNA, 63 bp, homo sapiens
aaatatccacttgcagattcttctaaaacagtgaagcgctccaaatatccacttgcagattct

SEQ ID NO: 7590 - DNA, 139 bp, homo sapiens
taggcctcaaagctctccaaatgtccacttacagattctacaaaaagacattttcaaaactgctcaatcaaaagaaaagtttaactctgtaaacttttttaggcctcaaagctctccaaatgtccacttgagattctac

SEQ ID NO: 7591 - DNA, 222 bp, homo sapiens
gttctcctcaacacagacccggattgcatcgtgagggcgagctgagttctcctctgcacagacttcagagatacagcgaaggcggagcagtgttctcctcagcacagacccgggcggacgggtgggccgggggcaccgcaagggcggagctgcgttctgctcagcacagacccgggggacacagcgaaggcagagcagcgttctcctcagcacagaccttgg

SEQ ID NO: 7592 - DNA, 318 bp, homo sapiens
agctagatacagagtgttgacacaaaggttctccaagtccccaccggagtagctagatacagagtgtctattggtgcattcacaaaccctgagcttgacacagagtgctgattggtgtgtttgcaaaccttgagccagatacagagcgcggattggtgtatttacagtccctgagctagacataaaggttctccaaggccccaccagagaagctagatacagagtgtcgattggtgcattcacaaaccctgagctagacacagggtgctgattggtgtgtttacaaaccttgagctagatacagagtgccgattggtg

SEQ ID NO: 7593 - DNA, 91 bp, homo sapiens; identical to SEQ ID NO: 7314

SEQ ID NO: 7594 - DNA, 120 bp, homo sapiens
ccgtgggtggtgacagtgacccagcgccctcgctgcccagccctgcctgtccccagccagcactgcagggaacccagtgaagtaacaaaccgtgggtggtgacagtgacccagtgccctc

SEQ ID NO: 7595 - DNA, 94 bp, homo sapiens
atcctgaacacctcgcatggtaacggcaccagaaagcagaggtgtgtcctatctatcactgtatcctgaacacctcgtatggtaacggcaccag

SEQ ID NO: 7596 - DNA, 120 bp, homo sapiens; identical to SEQ ID NO: 7594

SEQ ID NO: 7597 - DNA, 105 bp, homo sapiens
gttctgtgcaccctacctgatggtcctgagtgccccctggtggtgctgagcaccccctggtgtcctgagcccctcctggtggttctgtgcaccctccctgatggt

SEQ ID NO: 7598 - DNA, 203 bp, homo sapiens
acatatttatatataatttatattatatataaaatattttaatatactttaatatattcaagtaaattaaaagaatatattaatagttgtatataaaataagtattttaatatactttaataatgttaatgtatatactatatattttaatatactttaataacattaaagtgtattattaaatataataatatattaaagta

SEQ ID NO: 7599 - DNA, 105 bp, homo sapiens; identical to SEQ ID NO: 7597

SEQ ID NO: 7600 - DNA, 79 bp, homo sapiens
atgtgggaaagcttggaacttcctagagacttggagagctcagaaaacaggaggatgtgggaaagtttggaacttccta

SEQ ID NO: 7601 - DNA, 97 bp, homo sapiens
ccccggcctgacattccctttccacacacagccatgctctccaggcatttatccctgctgtcacccccgcctgacattccctttccacacacagcca

SEQ ID NO: 7602 - DNA, 105 bp, homo sapiens
tgctggaccatacatatactttttaagcacatacagaccatacatatactttttacacatatatgtatacatatatgtatatacagaccatacatatacagacca

SEQ ID NO: 7603 - DNA, 190 bp, homo sapiens
cgaggtgttcaggatacagtgatagataggacacacctctgctttctggtgccgttaccatgcgaggtgttcaggatgcagtgattgctggaccatacatatactttttaagcacatacagaccatacatatactttttacacatatatgtatacatatatgtatatacagaccatacatatacagacca

SEQ ID NO: 7604 - DNA, 99 bp, homo sapiens
atatgaggaaaccacaggggagtttcaggccagtcagcttttcatcttcaactttataactttcaccttaggatatgaggaacccacaggggagtttca

SEQ ID NO: 7605 - DNA, 103 bp, homo sapiens
ctgcctcagcctcccgagtagctggcattacaggtgcccgccaccactaccctccccctttcaggttcaagcgatcctctgcctcagcctcctgagtagctgg

SEQ ID NO: 7606 - DNA, 200 bp, homo sapiens
gcctgccttctttgccatgcttttggatgacatagtccagggagcgtcctctacagcataggctcggatggggccgcctgccttctttgccatgcttttggaagacatagtccagggagcgtgctctacagcataggctcagatggggctgcctacaaacttctttgccatgcttttggatgacatgctgtgggaagcag

SEQ ID NO: 7607 - DNA, 78 bp, homo sapiens
cacacctgcaaagccacggcacactcatcaacctctgtccacctccgatggtgacacacctgcaaagctacggcacac

SEQ ID NO: 7608 - DNA, 105 bp, homo sapiens; identical to SEQ ID NO: 7602

SEQ ID NO: 7609 - DNA, 124 bp, homo sapiens
gatctcggctcactgcaagctccgcctcccggtcttttcttttttttgagacggagtctcgtgctgtcacccaggctggagtgcggtggtgtgatctcggctcactgcaagctccacctcccgg

SEQ ID NO: 7610 - DNA, 157 bp, homo sapiens
caccaatcggcactctgtatctagctcaaggtttgtaaacacaccaatcagcaccctgtgtctaactcagggtttgtgaatgcaccaatcgacactctgtatctagctactctggtggggccttggagagcctttgtgtgacactctgtatctagct

SEQ ID NO: 7611 - DNA, 143 bp, homo sapiens
actaccataatgaaacttcgctgttgttatatggttggttagatgtttgcactgttggctattggaaggtctttcagttggatcgtttgtcattttgaaagactaccataatgaaacttcgctgttgttatgtggttggttag

SEQ ID NO: 7612 - DNA, 93 bp, homo sapiens
tcttttctttaaccactagtaggtgctccagacttggttggttttcttgttgtttagcattgtcttttctttaaccactactaggtgctccag

SEQ ID NO: 7613 - DNA, 75 bp, homo sapiens
aatgtcatcagttaagtcaggaacaggccattttcacttcttttgtggtggaatgtcatcagttaaggcaggaac

SEQ ID NO: 7614 - DNA, 67 bp, homo sapiens
tgttgcatgggaatattttgtgatgagggtacatatgcagttttgttgcatgggaatattgtgtgtt

SEQ ID NO: 7615 - DNA, 114 bp, homo sapiens
cttgagtcatctctttttttcttagtctagctaaagacttgttgcttttatcatcaaaaaacacaactctttattttttttatcttgagtcatctcttttttccttagtctagc

SEQ ID NO: 7616 - DNA, 76 bp, homo sapiens
caagtctctagggagttccaaactcccacatcttcctgtcctctgagcccttcaagtctcgagggagttccaaact

SEQ ID NO: 7617 - DNA, 134 bp, homo sapiens
cattgttttagtccatgccacaaggaatgacatctcacaaggaatgattacaggacacacattaacattctataggacggtgttctccaagcaaccattgttttagtccatgccacaaggaatgacacctcaca

SEQ ID NO: 7618 - DNA, 108 bp, homo sapiens
agctagatacagagtgtcaattggtgcattcacaaaccctgagctagacacagggtgctgactggtgtgtttacaaaccttgagctagatacagagtgccaattggtg

SEQ ID NO: 7619 - DNA, 96 bp, homo sapiens
tctggtgccaattctgtgtaagggatgaggtattccgtataagggatgaggtacggacctggctttatccatctggtgccaattccgtgtaaggga

SEQ ID NO: 7620 - DNA, 90 bp, homo sapiens
tctgaaagactgctctgaagttaagaaaaacaattttaaagattcagagatagaaatatattattatctgaaagattgctctgaagttaa

SEQ ID NO: 7621 - DNA, 206 bp, homo sapiens
cactgggactttgtctgaggctgcctcctccgtcattgccagtatcatgcacacctccatattgtgcccagcactgggactttgtctgatgctgcctcctccgtcattgccagtatcgtgcacacctccatattgtgcatacctccagtcatgcacccaacactgggactttcactggtgctactgcctccctcctgcaaagcacc

SEQ ID NO: 7622 - DNA, 180 bp, homo sapiens
tgctgattggtccattttacagagtgctgattggtccattttacagagtgctgattggtccattttacaaacctctagctagccacagagcactgattggtgcgtttttacagagcactgattggcacattttacgaacgtctagcttgccacagagtgctgattggtgcattttacaat

SEQ ID NO: 7623 - DNA, 112 bp, homo sapiens
aaatgcaccaatcagcactctgtgtctagctagaggattgtaaatgcaccaatcagcaatctataaaatggaccaatcagcactctgtacagtggaccaatcagcactctgt

SEQ ID NO: 7624 - DNA, 123 bp, homo sapiens
ataagtgtccatgaaatcttcacaatttatgtaaagagattgcagtaaagacaggtgtaagaaattataaaagtattaatttggggaactaataaatgtccatgaaatcttcacaatttatgt

SEQ ID NO: 7625 - DNA, 105 bp, homo sapiens; identical to SEQ ID NO: 7602

SEQ ID NO: 7626 - DNA, 85 bp, homo sapiens
cgaggtgttcaggatacagtgatagataggacacacctctgctttctggtgccgttaccatgcgaggtgttcaggatgcagtgat

SEQ ID NO: 7627 - DNA, 98 bp, homo sapiens
tatgaggaaaccacaggggagtttcaggccagtcagcttttcatcttcaactttataactttcacctgaggatatgaggaacccacaggggagtttca

SEQ ID NO: 7628 - DNA, 101 bp, homo sapiens
ctgcctcagcctcctgagtagctagcattagaggtgcccgccaccactaccctccgcctttcaggttcaagcgatcctctgcctcagcctcctgagtagct

SEQ ID NO: 7629 - DNA, 80 bp, homo sapiens
tctgcagcacgcagactccctgtgtccagcaaacagcgttgcagcacccctcagtgtctgcagcacgcagactccctgtg

SEQ ID NO: 7630 - DNA, 104 bp, homo sapiens
attggtgcattttacaatcctcttgctagctacagagtgctgattggtgcttttttacagagtgctaattggtgcattttacaatccacttgctagctacagag

SEQ ID NO: 7631 - DNA, 118 bp, homo sapiens
cttcagtacataatttcatatatgaatcttcatccatctttttcttttcttttctttctctcttcctttctttccttctttttctctttcttcagtacataatttcatatatgaatct

SEQ ID NO: 7632 - DNA, 132 bp, homo sapiens
aaaacatcttgctgggctgaaactactaacctacaggctgattgatctttgtccagaaataaataaatgaatcctccttctgaaaccacaaaacatcttgctgggctgaaaactactaacctacaggctgat

SEQ ID NO: 7633 - DNA, 90 bp, homo sapiens
aatttcccctttttataaggacaccaggtcatattggattaaggcccaccctaatgaccttattaatttccctttttataaggacaccag

SEQ ID NO: 7634 - DNA, 104 bp, homo sapiens
tgtcttttcctctgttctgattgttttataaatatgggttgttttaatgtgtggctggaattcaaaattgtgtcttttcctctgttctgattgttttataaata

SEQ ID NO: 7635 - DNA, 80 bp, homo sapiens
ggagacctaaacacagaggcagttaaatgctttgggaggcaattaaatgctttgggagacctaaacacagaggcagttaa

SEQ ID NO: 7636 - DNA, 262 bp, homo sapiens
gtctacagctactctctgtactatactgtctacactttgtctgcccatggcccaccatcaacaaacaccttactgtctacacctatgacctgcgttaatgtgtatactttctatgcctactacctgtgtcctaatgtctatgctctacgtctatactaactgcttgcatcctaatgtctacaccctaccgtctacacctactacctgtgtgctaatgtctacactctactgtctatacctactacctgtgtgctaatgtcta

SEQ ID NO: 7637 - DNA, 94 bp, homo sapiens
aatctcttgctagctacagagcactgatcggtgagtttttacacagcactgattggtgcattttacaatcccttgctagctacagagcactgat

SEQ ID NO: 7638 - DNA, 89 bp, homo sapiens
ctggtgtccttataaaaagggaaattaataaggtcattagggtgggccttaatccaatatgacctggtgtccttataaaaaggggaaat

SEQ ID NO: 7639 - DNA, 73 bp, homo sapiens
cagtctgagtccaaaggcctgagaaccaacagagtgaatggtgaaactaccagtctgagtccaaagacctgag

SEQ ID NO: 7640 - DNA, 104 bp, homo sapiens
tatttataaaacaatcagaacagaggaaaagacacaattttgaattccagccacacattaaaacaacccatatttataaaacaatcagaacagaggaaaagaca

SEQ ID NO: 7641 - DNA, 112 bp, homo sapiens
aactgagtaacaaagattcatgattacaacgtgaagggtgtatataaacttctcatctaaaaactccctctactataaaaagtgaactgagtaacagagattcatgattaca

SEQ ID NO: 7642 - DNA, 110 bp, homo sapiens
ttcagctttcttttgacgttcctcaccagttaaaaaaaaaaaaaaaagactggaaaaaaatagttactattcacttctttttcagctttctttcgacgttcctcaccagt

SEQ ID NO: 7643 - DNA, 110 bp, homo sapiens
cactacttactaaatttgaagctttcttgtattctgaggacttagcgagtcatacagaactggatttacagcactacttactaaatttgaagctttcttgtattctgagg

SEQ ID NO: 7644 - DNA, 112 bp, homo sapiens
aaatgcaccaatcagcactctgtgtctagctaaaggattgtaaacacaccaatcagcactctgtaaaatggaccaatcagcactctgtaaaatggacctatcagcaggatgt

SEQ ID NO: 7645 - DNA, 125 bp, homo sapiens
gccaggagttcaagaccagcctagccaacgaggtgaaaacctgtaatcccagcactttgggaggccgaggtgggaggatcagttgaagccaggagttcaagaccagcctagccaacggggtgaaa

SEQ ID NO: 7646 - DNA, 75 bp, homo sapiens
tattgtacctctcctgtctcagatgaccagctgaaatttttaacataaatttattgtacctttcctgtctcagat

SEQ ID NO: 7647 - DNA, 100 bp, homo sapiens
ccttagtgtacattccgaaggaggcagaatctgtggtttctgtgctacttcccattctcctgtccatctcttcccttagtgtacattccgaagaaggcag

SEQ ID NO: 7648 - DNA, 125 bp, homo sapiens
ttgggttagaggcccaacttaggagggttagagtccctactaagacagagttaaaggcctccttaataaaaggcaaggacacttgaccaaacttgggttagaggcccaacttaggaaggttagag

SEQ ID NO: 7649 - DNA, 82 bp, homo sapiens
tggcacatgtatacatatgtaacaaccctgcaaggtaatgggtacagcataccaacatggcacatgtgtacatatgtaacaa

SEQ ID NO: 7650 - DNA, 104 bp, homo sapiens
ttttagataaaagaattatgggcattagttttgaaattagatttgaaaatcttctgaaacaggttacaggagattttagataaaataattatgggcattagttt

SEQ ID NO: 7651 - DNA, 103 bp, homo sapiens
aaggtaccaacacataaatgttatattagcactttttcaactttcattaggtaagctggggctgttattaaggtaccaacacataaatgttatattagcactt

SEQ ID NO: 7652 - DNA, 84 bp, homo sapiens
aagattttacctttaggaaaaaggaaaggtttaccagtaagattttacttttagggaagattttacttttaggaaaaaggaaag

SEQ ID NO: 7653 - DNA, 104 bp, homo sapiens
attgggggcatagatgggtgtatctcccagagggtccctgggatggcaggactgtctctgggctatggtagattgggggcatagatgggtgtgtctcccagagg

SEQ ID NO: 7654 - DNA, 98 bp, homo sapiens
atgttgaggtatgttctttctatacccagttttttgagggtttttatcatgaagggatgttgaagtttatcaaatgttgaggtatgttctttctatac

SEQ ID NO: 7655 - DNA, 78 bp, homo sapiens
atttactgagctaaagaatatatatgtgtatgtgtgtttgtgtctgtgtgtgcatttactgagctaaagaatatatat

SEQ ID NO: 7656 - DNA, 83 bp, homo sapiens
ggagagaggagagagactggctctgtcaccctttctcctgcattctaaatctggcttgagagagaggagagagagaggacaga

SEQ ID NO: 7657 - DNA, 108 bp, homo sapiens
actctgaccccacattttccttctgcactgctccataagaggcccgccccgccccagtagggactcttgtgttgagactctgaccccacattttccttctgcactgct

SEQ ID NO: 7658 - DNA, 110 bp, homo sapiens
gctttgggcagtatggccattttaacaatattgtgaagaatgtcattggtagtttgataagaatagcactgaatatgtaagtggctttggacagtatggccattttaaca

SEQ ID NO: 7659 - DNA, 94 bp, homo sapiens
gtacagcatgctcttcttcctttttgaacaacctcatcggggatacgtcccttcctgccctcattctgtacagcatgctcttcttcctttttga

SEQ ID NO: 7660 - DNA, 90 bp, homo sapiens
aatcttcctttcaaatgttaagagaacacataaacacacacacatacatacatacttacatacatataattttcctttcaaatgttaaga

SEQ ID NO: 7661 - DNA, 129 bp, homo sapiens
aactttccattataagaatattttacatctgccaggatattgccctatatcttagaaattctgtagaaagttttaaatgcaactttccatcataagaatattttacatctgccaggatattgccctata

SEQ ID NO: 7662 - DNA, 105 bp, homo sapiens
ctaaaagttctgcagcctcactaaaatgtttgcaaccatggcatgtgagaaagttggtttccccaagtgctaaaagttctgcagcctcactaaaatgtttgcaac

SEQ ID NO: 7663 - DNA, 103 bp, homo sapiens
tctggttgtttaaaagagcctggcacctcctctctctttttctctctctctccctctctctctctctctggttgtttaaaagagcctggcacctcctctctct

SEQ ID NO: 7664 - DNA, 97 bp, homo sapiens
gctgattggtgcatttttacagagtgctgattggtgcattcacaatcctttagctagacacagagcgctgattggtgcatttttacagagggctgat

SEQ ID NO: 7665 - DNA, 155 bp, homo sapiens
agtagagacggggtttcaccgtgttagccaagatggtctcgatctcctgaccccgtgatctgcccgcctcggcctcccaaagtgctgtatttttttttttttcagtagagacggggtttcaccgtgttagccaggatggtctcgatctcctgacc

SEQ ID NO: 7666 - DNA, 108 bp, homo sapiens
gtagctgggactacaggcagactatgccgccgccaccacgcctagctaatttttgtatttttagtagagatagggtccaggtagctgggactacaggcagagtatgcc

SEQ ID NO: 7667 - DNA, 116 bp, homo sapiens
tgtcagcctcttccccctgttgagtctcctctccccctattgagtctcatcttcccctcattgagtctcctcttccttcttcccccactgagcctcctctccccctattgagtctc

SEQ ID NO: 7668 - DNA, 109 bp, homo sapiens
gctggacggatggagatggtagatagcaggggctgcttaccttggtgatgcctgggttccacagaggcggcccagctggacggatggagatggcagatagcaggggctg

SEQ ID NO: 7669 - DNA, 83 bp, homo sapiens
ccaggatggagagagggaggagtgcctagggcagggtctgggaaacagccatggccccatccaggatggagggagggaggagt

SEQ ID NO: 7670 - DNA, 71 bp, homo sapiens
agtactggcctaaccaaaattaaactctgagtactggcctaaactctgactactggcctaaccaaaattaa

SEQ ID NO: 7671 - DNA, 87 bp, homo sapiens
caaatctatagagacagaaagtagactggtgtctactttccatttgtagactggtgtctacaaatctatagagacagaaagtagact

SEQ ID NO: 7672 - DNA, 78 bp, homo sapiens
cttcacttcagcctctgattggtgggagccaagtcttcatttgcaaagggtgtaacttcacttcagcctctaattggt

SEQ ID NO: 7673 - DNA, 131 bp, homo sapiens
accccaaatcaacagaatatacattctgctcagcaccacattgcgcttattctaaaattgaccacataatagacatctacagaactctccaccccaaatcaacagaatatacattctgctcagcaccacat

SEQ ID NO: 7674 - DNA, 86 bp, homo sapiens
tttatttattcaccttcttgtaactttgtgtatttactgtaaattttttgtatgtaatttttttgtatttattcaccttcttgtaa

SEQ ID NO: 7675 - DNA, 79 bp, homo sapiens
caacttttctgtaaatctaaaaccattctaaaatgaaaagtttatttaggccagcccaacttttctctaaatctaaaac

SEQ ID NO: 7676 - DNA, 79 bp, homo sapiens
tatactttgtcattggatttaaacagtgaccacaagtgaatataggagattctatatactttgtcattggatttaaaca

SEQ ID NO: 7677 - DNA, 101 bp, homo sapiens
tgggattacaggcgtgagccaccgcgcctggccagaactcttgacctcaagtgattcacccgccttggcctcccgtaatgggattacaggcatgagccacc

SEQ ID NO: 7678 - DNA, 88 bp, homo sapiens
ttctaagtctttctctcctttagaaaaaaagagataatctgattctattttggatctgtgtacattctaagtctttctctcatttaga

SEQ ID NO: 7679 - DNA, 113 bp, homo sapiens
attacagagattatgcagtgtatcgtggtcaaccagtaaatttgttgtccgtaaagtacggtgcagaaatctgagattacagagattatgcagtgtatcatggtcaaccagta

SEQ ID NO: 7680 - DNA, 213 bp, homo sapiens
agatcacaccactgcactccagcctgggcaacagcgcaagaagatcacaccactgcactccagcctgggcaacagtgcaagaagatcacaccactgcactccagcctgggcaacagaataagactctgtcttaaaagcaaaaacgagaaataaattcaaagaaaatgtacgtaaagaaacaaaaagtttactgcactccagcctgggcaacag

SEQ ID NO: 7681 - DNA, 101 bp, homo sapiens
taaaggttctccaagtccccaccagattagctagacactgggtactgattggtgcctttacaaaccttgaactagacgtaaaagttctccaagtccccacc

SEQ ID NO: 7682 - DNA, 79 bp, homo sapiens
atttaagtttggcaacctcttatctgcagttactcgcccagtggcatgggctaatttaagtttggcaacctcatatctg

SEQ ID NO: 7683 - DNA, 125 bp, homo sapiens
gaacataaattgtgaagatttcatggacatttattagttcctcaaattaatacttttataatttcttatgcctgtctttactgcaatctctgaacataaattgtgaagatttcatggacatttat

SEQ ID NO: 7684 - DNA, 107 bp, homo sapiens
ccaataacaagcaccaagattgaaaggataaaatcctcctagattaaaccaggaagaaatagaaactgtaatcagaccaataacaagcaccaagattgaaaggataa

SEQ ID NO: 7685 - DNA, 106 bp, homo sapiens
aaacaattctataaatgtgtttttcaattttttaagggtattttaaatataggatattttaaatataggtaaatataaacaattctataaatgtgtttttcaattt

SEQ ID NO: 7686 - DNA, 110 bp, homo sapiens
tattttgatatgactggcacatgactagtaattaatggtttagaacccaaagacaagatacggactatagatacatattttgatatgactggcacatgactagtaattaa

SEQ ID NO: 7687 - DNA, 69 bp, homo sapiens
tcaagaaaaagaacattcaaggcaattttatattttttccatattcaaatcaattaatattcaagaaaa

SEQ ID NO: 7688 - DNA, 78 bp, homo sapiens
aggaagttccaaactttcccacatcttcctgtcttctgagccctccaagtctccaggaagttccaaacttttccacat

SEQ ID NO: 7689 - DNA, 96 bp, homo sapiens
taactactcttttaaagagaaactgcattaacttttgcaattgattctaaagttacaaaagcagataggattataactacttttttaaagagaaac

SEQ ID NO: 7690 - DNA, 125 bp, homo sapiens
ataaatgtccatgaaatcttcacaatttatgttcagagactgcagtaaagacaggtgtaagaaattatgaaagtattaatttggggaactaataaatgtccatgaaatcttcacaatttatgttc

SEQ ID NO: 7691 - DNA, 117 bp, homo sapiens
accaatatataagcatttgtaatgcttatatataagcttatataaccagtatataagcatttgtaatgcttatatataagcttatataaccaatatataagcatttgtaatgtttat

SEQ ID NO: 7692 - DNA, 130 bp, homo sapiens
gaattataaagcattgtttttctttatgtggttttgtgaatatacactaagcttaaaaatggaaattggtttattaatattactatcaccatcggaattataaagcattgttattctttatgtggttttg

SEQ ID NO: 7693 - DNA, 79 bp, homo sapiens
tctctaggaagttccaaacttatccacatcgttctgtcttctgagccctccaaatctctaggaagttccaaactttccc

SEQ ID NO: 7694 - DNA, 76 bp, homo sapiens
tggtagagattcctttgactctgtaagcctttgaaaaagccatgggaattttggtagagattcctttgaatctgta

SEQ ID NO: 7695 - DNA, 102 bp, homo sapiens
cactggttgaattataagaagcatcacaaggggtgtgtgtgtgtgtgtgtattctgaaagtaccacaagtctataaaacagtggttgaattataagaagcat

SEQ ID NO: 7696 - DNA, 100 bp, homo sapiens
ctcatagatcaaggccagaattctaagtggatcaatcagagagtatatctatgaggaatgtccaaccagaacatactcatagatctaggccagaattcta

SEQ ID NO: 7697 - DNA, 78 bp, homo sapiens
acttgtgtatccatgtagtgagcagaagaaaagtcttgataagacaaatacgacttgtgtatccatgtagtgagcaga

SEQ ID NO: 7698 - DNA, 104 bp, homo sapiens
aggcatgagaattgcttgaacctgggaggcaaaggttacagtgagctgagatcatgccactgcactccaggctgaggcacgagaattgcttgaacctgggaggc

SEQ ID NO: 7699 - DNA, 91 bp, homo sapiens
gcctgtaatcccagcactttgggagactgagttaagagaatcacttggacaggcgtggtggctcacgcctgtcatcccagcactttgggag

SEQ ID NO: 7700 - DNA, 235 bp, homo sapiens
gtctgtattcccaggtactcgggaggctgaggcaggagaatcacttgaatctgggaggcagaggttgcggtgagctgagatcgtgccattgcactccagcctgggcaacaagaacaaaactctgtcttaaaaaaaaaaaaaaaaaaaatcacttgagcccaggactttgggaccagctaatacaaaaattagccaggtgaggtagcatgcatctatagtcccagctagttgggag

SEQ ID NO: 7701 - DNA, 125 bp, homo sapiens
gaacataaattgtgaagatttcatggacatttattagttgcccaaattaatacttttataattttttacgcctgtctttactgcagtctctgaacataaattgtgaatatttcatggacatttat

SEQ ID NO: 7702 - DNA, 144 bp, homo sapiens
tgaagaggaatttgtgaagataaaataaaaacttttatttttcttattcttaattgatctaacagataaacagggtctacataaagaaaggaagtgcattgaagaggaatttgtgaagataaaataaaaacctttatttttctt

SEQ ID NO: 7703 - DNA, 97 bp, homo sapiens
caggcgatatcgccactgatcccacagataaaacaataaaaaatgataataaaccaataaaaaatgatacaggggatatcgccactgatcccacaga

SEQ ID NO: 7704 - DNA, 135 bp, homo sapiens
tcaaggaatttaagacaggtatttaagacagaaacaaaatgataagatgatagagaaaatgataaacaaatgatagagatactacaattagcagtcaaggaatttaggacaggtatttaagacagaaacaaaatg

SEQ ID NO: 7705 - DNA, 65 bp, homo sapiens
taatttataattagatgttttactaaaaatatttataattaaatttatacttatatgttttacta

SEQ ID NO: 7706 - DNA, 93 bp, homo sapiens
agatttcatcataaatttaaaatgtgtaatagtagtctcttgtaatataatccttaaaaatatcaattacagatttcatcataaatttaaatt

SEQ ID NO: 7707 - DNA, 87 bp, homo sapiens
aatcctatttacattttaaaattaaatactaaaagaaaggaaactctatatccatacttggaatcctatttacattttaaaataaaa

SEQ ID NO: 7708 - DNA, 106 bp, homo sapiens
tggtcttgctctgtcactgaggcaggagtttgctttattgattgattaattgattaatcaattgattaattgaatcatggtcttgcgctgtcactgaggcaggagt

SEQ ID NO: 7709 - DNA, 94 bp, homo sapiens
atatgcccagtgatgttaatttaagattaactaaaatgtgcttgattttcctagaaaaccagtgatatgcccagtaatgttaatttaagattaa

SEQ ID NO: 7710 - DNA, 100 bp, homo sapiens
aaatctttggtaagtcacttaaacacttagtttcatcctacaaaatgttacagaacaggtatcaaatctttggtaagtcacttaaacacttagtttcatc

SEQ ID NO: 7711 - DNA, 111 bp, homo sapiens
agtggcaaactttctttcctttctttttcttttctttctttctttcttgagtcagagtctcactttgtcatccaggctggagtgcagtggcaaactttctttcttttcttt

SEQ ID NO: 7712 - DNA, 99 bp, homo sapiens
taacctgattttaaaatgggctaagtaactgactagacatttctccagagaagacatattaaactaacaggtattaacctgattttaaaatgtgctaag

SEQ ID NO: 7713 - DNA, 192 bp, homo sapiens
tcctgctgattggttcactttacagagagctgattggtccgttttgacagggtgctgattggtgcatttacaatccctgagctagacacaaaagttctccaagtccccactagattagctagacacggggtgctgattggtgcatttacaaaccttgagctagacacagagtgcccattggtgcattcacaa

SEQ ID NO: 7714 - DNA, 107 bp, homo sapiens
ggaaagtacggaagttctcattctctctctctctgtctgtctctctctctctctctaagcctggggcatcttgcagtgttgggaaagtaaggaagttctcattctct

SEQ ID NO: 7715 - DNA, 120 bp, homo sapiens
ccactatcctgagagatttcaagccaaaaaatacccttccaggccacttccatgccactatcctgagagatttcaagcaaacccctgtccaacataccactgtcctgagagatttcaagc

SEQ ID NO: 7716 - DNA, 82 bp, homo sapiens
gtatcacctgcctgatacccttttttagctgcagcccagaccagggaaacaacttgccagtgtcacctgcctgatacccttt

SEQ ID NO: 7717 - DNA, 102 bp, homo sapiens
ctggtgtttcttgtggtatatgacaatcagagtttctgaaagaactaactttacatcctatcatttttatttttataatctggtgtttcttgtggtatatga

SEQ ID NO: 7718 - DNA, 105 bp, homo sapiens
atccaacatttctactgtgtaaagccttggcacatggtatcaccatgagctggctttatcaaatttcatttcaaagtagatatccaaaatttctactgtgtaaag

SEQ ID NO: 7719 - DNA, 187 bp, homo sapiens
tagctagatacagagtgtggattggtgtgtttacaattcctgagctagacataaaagttctgcaaggccccaccagagtagctagatacagagtgtggattggtgcattcacaaaccctgagctagacacagggtgctgattggtgtgtttgcaaaccttgagctagatacagagtgccaattggtg

SEQ ID NO: 7720 - DNA, 122 bp, homo sapiens
tgtgcctgtaatcccagctactcaagaggtgggtgcacaggtggtatgtgcctgtaatcccagctactccctgtaatcccatataccacacaggtggtctgcgcctgtaatcccagctactc

SEQ ID NO: 7721 - DNA, 83 bp, homo sapiens
aggggtggtagtggctccctgctgttgtcatctcttccttttgtctctccggcttaggggtggtagtggctccctgctgttgt

SEQ ID NO: 7722 - DNA, 100 bp, homo sapiens
atgagtctgaataaggtttctttgagaagaaatgtggattaatgagtctgaataagaaatgggcatatgagtctgaataaggtttctttgagaaggaatg

SEQ ID NO: 7723 - DNA, 109 bp, homo sapiens
gagaacctttatgtctagctaagggattgtaaacgcaccaatggacactctatctagctactctggtggagacttggagaacctttatgtctagcgaagggattgtaaa

SEQ ID NO: 7724 - DNA, 143 bp, homo sapiens
aaaaaaaaaacccaaaacccaagtcttcctactacatgcccagcctggcccactgcactccagcctgagcaacaagagcaaaactccgtctcaaaaaaaaaaaacccaaaacccaagtcttcctactacgtgcccagcctggc

SEQ ID NO: 7725 - DNA, 111 bp, homo sapiens
atctgttcagagggtaatttaccaatctgtagggaaatagacaccttcatatgttactggaaggagtagaagttggtacgatctgttcagagggtaatttaccaatatgta

SEQ ID NO: 7726 - DNA, 96 bp, homo sapiens
atgggtagaactgtatttcaatagacagagggaactgtgtcacacctatgataggtttagggtacaggggtctatgggtagaactgtatttcagta

SEQ ID NO: 7727 - DNA, 132 bp, homo sapiens
tcttcctttcttttttttaatttaacttttaacttttttaacttttaatttaactttttttaacttttttttacttttaattttttaaaaattaaaaaagttaatttttttaacttttaatttaactttttt

SEQ ID NO: 7728 - DNA, 110 bp, homo sapiens
taggatatattcaaagtttaaaagataatattccttttcacagtacgggtccagttaaggtacagtgctgactgtaggatatattcaaagtttaaaagataatattcctt

SEQ ID NO: 7729 - DNA, 97 bp, homo sapiens
agctccaaaaagtttatgaacttgtctagggcttgttatacattttgtaacattttacagatgagaacacaagctccaaaaagttaatgaacttgtc

SEQ ID NO: 7730 - DNA, 77 bp, homo sapiens
atagggttcaaggaagccagcaagtcaagtcaggtaggcacctgtagaatatggatagggttcaaggaagccagcaa

SEQ ID NO: 7731 - DNA, 88 bp, homo sapiens
gccgtgtgtagactagtcagcttctggggtgactagagcagggtttgctgtttcctcaagtttccgccgtgtgtagactggtcagctt

SEQ ID NO: 7732 - DNA, 98 bp, homo sapiens
caccgcgcggcactatgcaatcttcggttagttaccaggtctaagttaggcttctggattccaactccacgctccaccgcgcggaactatgcaatctt

SEQ ID NO: 7733 - DNA, 80 bp, homo sapiens
tattattttatttatttggacttcaatattattgacacctcaatattataaaataaatattattttatttatttggacct

SEQ ID NO: 7734 - DNA, 94 bp, homo sapiens
gtggccagaggtggccctggctccccttttacccatggatcctatggaccccttaccgccaaggtgcggtgtggccagaggtggccctggctcc

SEQ ID NO: 7735 - DNA, 106 bp, homo sapiens
aagaaatggataaatgacatttctccattacctggctttgttgtaggcctgggaaagccaatttcaatgtcattgtcccaagaaatggataaatgacatttctcca

SEQ ID NO: 7736 - DNA, 114 bp, homo sapiens
ccatgtcccttggccacctggggctcatcttttagagggaaaagctgtgagctgggtgctcctccactactccatgtcccttggccacctggggctcttcttttagagggaaaa

SEQ ID NO: 7737 - DNA, 126 bp, homo sapiens
aaatcatgctgcctttttctagccagcataggtgaggttgcagcataggtgaggttgcagcataggtgaggttgcagcataggtgagaaatatgctgcctttttctagccagcataggtgaggttg

SEQ ID NO: 7738 - DNA, 112 bp, homo sapiens
attctaaagtttatatgaaaaggccagaaagaaagaaaatcccaatcaaaatcccataggttatttatagatatcaacaattgaattctaaagtttatatgaaaaggccaga

SEQ ID NO: 7739 - DNA, 114 bp, homo sapiens
ggtatcagcagcagaggctgcagaacagcaaatattgctgaacagcaaatgtccactccagaccttgtttgcctgggtatcagcagcagaggctgcagaacagcgaatattgct

SEQ ID NO: 7740 - DNA, 142 bp, homo sapiens
aagattgtaaacgccccaatcagggctctgtgtctagctaaaggattgtaaatgcaccaatcagcactctgtaaaaacacaccaatcagcactctgtgtatagctagaggattgtatatgcaccaatcagcactctgtaaaa

SEQ ID NO: 7741 - DNA, 73 bp, homo sapiens
gctttagacgtactaaaacttactattaatactttgcttatttcaaaatgctttagacttactaaaacttact

SEQ ID NO: 7742 - DNA, 86 bp, homo sapiens
caaatagtagctttctatacagtgtttatagcccttgtactttttttctttttttgcacaaatagtagctttctgtacagtgttta

SEQ ID NO: 7743 - DNA, 129 bp, homo sapiens
tggcctatgacatgattttatcgtgtgtgtgtgtgtgtgtgtaggttttcgtccatggttcctgacttattaactaccacagccctttggcctatgacgtgattttatcgtgtgtgtgtgtgtgtgtgt

SEQ ID NO: 7744 - DNA, 91 bp, homo sapiens
gaaaacaatgttaggcatgatggtgcaagatagaatgcaaaaaaaaaaaaaaaaagacattcaggaaaacaatgttaggcatgatggtgca

SEQ ID NO: 7745 - DNA, 89 bp, homo sapiens
acatgttttgtaaatgtattatatactgcataatatataccttaccaataacatagccaattaacacgttttgtaaatgtattatatac

SEQ ID NO: 7746 - DNA, 114 bp, homo sapiens
aaaacagttgaaactaagtttatattgtttaaggatgtgtgtttaggtggtgtagctatttaaaaagggcagtgattaaaacagttgaaactaagtttacattgtttaaggatg

SEQ ID NO: 7747 - DNA, 92 bp, homo sapiens
tttgttttttttgtagagacggggtttcacctgtgtgtgtgtgttttgtttgtttgtttgttttggtttttttgtagagacggggtttcacc

SEQ ID NO: 7748 - DNA, 137 bp, homo sapiens
agaggaggcatttcaaataaggtgtattatttgatacatggtagcagtggaacaggatacagtcaaatatgcataaggagaatttagtgtattatagaggaggcatttcaaataaggtggattatttgatacatggt

SEQ ID NO: 7749 - DNA, 110 bp, homo sapiens
gctggagtgcaatggtgcggtcttggctcacctccgcctcttgagacggagttttcctcttgttgcccaggctggagtgcaatggtgcggtctcggctcacctccgcctc

SEQ ID NO: 7750 - DNA, 91 bp, homo sapiens
ctggtgctggctccagaaggatccctcacctggctgagccccaccccagtcacaggctgggtcctggtgctggctccagaatgatccctca

SEQ ID NO: 7751 - DNA, 116 bp, homo sapiens
attctaaagttcattgaaaaaacaaacactagtcagataaagacactgacagtattctttttaaaaaactacaccaggtaattctaaagttcattgaaaaaacaaacactagtcag

SEQ ID NO: 7752 - DNA, 95 bp, homo sapiens
caatgagctgagatggtgccacttgggggtgctggggcaggaggattgcttgaacttgggagattgagtctacagtgagctgagatggtgccact

SEQ ID NO: 7753 - DNA, 169 bp, homo sapiens
gttctccatggccccatcagattagttagacacagagtatcgacacaaaggttctccaaggccccaccagagcagctagatacagagtgtcgattggtgcactcacaaaccctaagctagacataaatgttctccaaggccccaccagagtagctagatacagagtgtc

SEQ ID NO: 7754 - DNA, 159 bp, homo sapiens
aaaaaaaaaaaaaatatatatatatatacatatatatatatatatatatatatatatgtatatatatatatgtatatatatatgtatatatatacatatatatatatatgatggcataagaccctctctttaaaaaaaaaaaaaaaatatatatatata

SEQ ID NO: 7755 - DNA, 85 bp, homo sapiens
agagacggtagctcctctctgcagctggtcatcatgttgtctcttcagctctcagcagagagggtagctcctctctgcagctggt

SEQ ID NO: 7756 - DNA, 99 bp, homo sapiens
gatagctctgaaaaggagtcaaggaagaagctggtctctgcattgaatgataggtagaaaatggaagtggggacgatagctctgaaaaggagtcaagga

SEQ ID NO: 7757 - DNA, 84 bp, homo sapiens
tacaatggctattatattataaatacataatataaatatttataaatataaatattttctacaatggctattatactataaata

SEQ ID NO: 7758 - DNA, 104 bp, homo sapiens
aatcagaggctgaagtgaagttacaaagttataccctatgcaaacgtctgattcgttgcagaaagcaaccaatcagaggctgaagtgaagttacaaagttatac

SEQ ID NO: 7759 - DNA, 74 bp, homo sapiens
tagtgtctcagacctctgcacaaatgtgcctttctggagagtctgccagatagtgtctcagacctctgcacgaa

SEQ ID NO: 7760 - DNA, 95 bp, homo sapiens
ttagaatatccagcagaaaaaccagcttagaataagcacaagctgtaatgtaccagcaggtttttagaatatccagcagaaaaaccagcttagaa

SEQ ID NO: 7761 - DNA, 102 bp, homo sapiens
ttcatggattggaagaatcaatattgttaaaatgtccacacaacctaaagcaatctatagattcttcatggactggaagaatcaatattgttaaaatgtcca

SEQ ID NO: 7762 - DNA, 91 bp, homo sapiens
attcctgtccacttaagtcagggattcatgggattgtgaattcccatgtgaattcccaagtgattcctgtccactgaagtcagggattcat

SEQ ID NO: 7763 - DNA, 88 bp, homo sapiens
tgtaatttcttggggccaaggtcctgattttttatagttcataacatttaattatagtccataaatgtaattgcttggggccaaggtc

SEQ ID NO: 7764 - DNA, 112 bp, homo sapiens
ggccctgcagtgtgactgtctgcatcacccccattagaccttgacctcatgtatcaagatcttgcccctctgcttccctctaccccggccctgcagtatgactgtctgcatc

SEQ ID NO: 7765 - DNA, 123 bp, homo sapiens
gaatgagccctagatgctgagcctccctgcccacctgtgctggggttcaggaagcaccttctgaatcaggatcttccacgaatgagccctagatgctgagcctccctgcccacctgtgctggg

SEQ ID NO: 7766 - DNA, 85 bp, homo sapiens
agacaagctataggtctgcctttcttcgtggttcaggacatataaacaaaaagagggtgagataagctataggtctgcctttctt

SEQ ID NO: 7767 - DNA, 90 bp, homo sapiens
aagagatactcttaaacacttctgataagaacagatactacacttgatcttagccaaaaggccaagaagcgatactcttaaacacttctg

SEQ ID NO: 7768 - DNA, 135 bp, homo sapiens
cctagaggctggagtatgttatgagcaggaaccacagcttcacctgtgggtaggagcccatggtccaccctgtgaggttcttgagctcctcctagaggctggagtatgttatgatcaggaaccacagcttcacct

SEQ ID NO: 7769 - DNA, 109 bp, homo sapiens
taaatacatggatttatttctgagttctctattcagtgtatgttgtaggcacccttgtcaaatatcagtttcctgtaaatacatggatttatttctgagttctctattc

SEQ ID NO: 7770 - DNA, 123 bp, homo sapiens
aaatgtccatgaaatcttcacagtttatgttcagagactgcagtaaagacaggtgtaagaaattataaaagtattaatttcgagaactaataaatgtccatgaaatcttcacaatttatgttc

SEQ ID NO: 7771 - DNA, 75 bp, homo sapiens; identical to SEQ ID NO: 1938

SEQ ID NO: 7772 - DNA, 105 bp, homo sapiens
tggagaacctttatgtctagctcagggtttgtgaatgcaccaatcgacactctgtatctagctactctggtggggccttggagaacctttatgtctagttcaggg

SEQ ID NO: 7773 - DNA, 271 bp, homo sapiens
gttttgacagggtgctgattagtgcatttacaatccctgagctagacacaaaagttctccacctccccagtagattagctagatacagagtgtcaattggtgtatttacaaaccctgagctagacacagagtgctgattggtgcatttacaaaccttgagctagatacagagtgcctattggtgcattcacaatcccttagctagacataaagattctccaactccccaccagattaactagatacagagtgccgattggtgcattcacaa

SEQ ID NO: 7774 - DNA, 108 bp, homo sapiens
caccaatcggcactctgtatctagctcaaggtttgtaaacacaccaatcagtaccctgtgtctagctcagggtttgtgaatgcaccaatcgacactctgtatctagct

SEQ ID NO: 7775 - DNA, 93 bp, homo sapiens
ttacattactagttaaaattgttacattactagttaaaattgttaaattatattctgcgtcatgttacattactagttaaaattgttacatta

SEQ ID NO: 7776 - DNA, 131 bp, homo sapiens
agcagtcatacttttttaaaagaatgatgaagctgtaagaaaatacttccattacacatatcataacgcttgatatgtattttgagaaattgagcagtcatacttttttaaaagaatgatgaagctgtaag

SEQ ID NO: 7777 - DNA, 255 bp, homo sapiens
aggattgtaaaatgcaccaatcagcactctgtagctaggattgtaaaacgcaccagtgttctgtagctagctagaggtttgtaaaatgcaccaatcagtgctctgtagctagccagaggttcgtaaaatgcaccaatcagtgctctgtaaaaacacaccaatcagtgctccgtagctagctagaggtttgtaaaatgaaccaatcagcactctgtaaaatggaccaatcagtgctctgtaaaatggaccaatcag

SEQ ID NO: 7778 - DNA, 152 bp, homo sapiens
taaacacaccaatcagcactatgtgtctagctaaagtttgtaaatgcaccaatcagcactctgtgtctagctaatctggtggggacttggagaacttttgtgtctacctaagggattataaatgcaccaataagcactctgtgtctagctaa

SEQ ID NO: 7779 - DNA, 159 bp, homo sapiens
aatataatatgaattcgctgtaatatgtgttagtgtagggtaaaaaattggggggggtggaattgaaaatcataaagggaaaatagcaaatcataaagggaaaatagcaaatataatatgaattcactgtaatatgtgttagtgtagggtaaaaaattg

SEQ ID NO: 7780 - DNA, 101 bp, homo sapiens
gtcttcctcccccggctcggtctcccccgccattccttggtctccccccagccccccagtcccccccgatgccccttggtcttcctccccctgctcggtct

SEQ ID NO: 7781 - DNA, 99 bp, homo sapiens
atatgaggaaaccacaggggagtttcaggccagtcagcgtttgatcttcaactttatcgtcttcaccttaggatatgaggaacccacaggggagtttca

SEQ ID NO: 7782 - DNA, 73 bp, homo sapiens
cccaggctggggtgcagtggcgccatctcggctcaccgcaagctccgcttcccaggctggggtgcagtggtgc

SEQ ID NO: 7783 - DNA, 132 bp, homo sapiens
cccccagaatagtaacatcagcatcatctgggaacttgtattcatgaatgttgaaatatgaaaattcatacaacagtgtttctcaaactgtgacccccagaatagtaacatcagcatcatctgggaacttgt

SEQ ID NO: 7784 - DNA, 97 bp, homo sapiens
cctaaacccagagtccatggaagtgccctgaggtctcaacttaaatgtctctccctctggaaaccctttcctaaacccagagtccacggaagtgccc

SEQ ID NO: 7785 - DNA, 75 bp, homo sapiens
ttttgatatttaatttatccttgctatgtattcaaggcataaagagtgcatattttgatatttaatctatccttg

SEQ ID NO: 7786 - DNA, 95 bp, homo sapiens
agcctggagtatttgaaagcttttcaaactttatccagcctggagtatttgagagctttccaaactttatctagcctggagtatttgagagcttt

SEQ ID NO: 7787 - DNA, 99 bp, homo sapiens
ctggctcaggaaagtcctcagctttagctgttaaagttttaaaagccactttaaagttttaaagccactgcctggctcaggaaagccctcagctttagc

SEQ ID NO: 7788 - DNA, 123 bp, homo sapiens
ccttcctggttgcttcccggcaattttacttccgtttcctgcctcagcctcttgagtatctgggattacaggcatgcgccaccactacttccttcctggttgcttcccggcaattctacttcc

SEQ ID NO: 7789 - DNA, 101 bp, homo sapiens
agaccgagcagggggaggaagaccaaggggcgtcggggaggactggggggctggggggagaccaaggaatggcgggggagaccgagccgggggaggaagac

SEQ ID NO: 7790 - DNA, 73 bp, homo sapiens
tctagtaaaaatacaaaaattagctgggcgtggtgaaaccccatatctatctactaaaaatacaaaaattagc

SEQ ID NO: 7791 - DNA, 112 bp, homo sapiens
gagtttgagagcagtctgcgcaagcctagggagaccctatttccacaattttttttttttttaaagttaaccaggagtttgagggcagtctgcgcaagcctagggagaccct

SEQ ID NO: 7792 - DNA, 102 bp, homo sapiens
caatgtgttatttggttttctgttcctgcattgatatccatgtgtacccaatgcttagcttccatttataagtgagatcaatgtgttatgtggttttctgtt

SEQ ID NO: 7793 - DNA, 134 bp, homo sapiens
tctgaagctgctcacccttgcccagacctgggcagcctaacctgatatcctaaggatcaggttggtctcatcctttcttctaccaccttcctatctgaagcttctcacccttgcccagacctgggcagcctaac

SEQ ID NO: 7794 - DNA, 106 bp, homo sapiens
ggggaaggactattacactgaaaggaattacagtgtcaatgcttaggactattacactattacgcttaggggaaggactattacactgaaaggaattacagtgtca

SEQ ID NO: 7795 - DNA, 136 bp, homo sapiens
tgatgatgatggaattcttttagctcctagaaatgttccctttcttgccagagtcttcaaaatcttagtagccatgaggacaaagatcgtgatgatgatggaattcttttagctcctagaaatgttccctttcttg

SEQ ID NO: 7796 - DNA, 86 bp, homo sapiens
ctgggagccagctaagttatatcactgccctccaatactctcaccactcaagagtactgggagccagctaagttatatcactgccc

SEQ ID NO: 7797 - DNA, 75 bp, homo sapiens
gtggggacgtggagaaccttcgtgtagacactctgtatctagctaatctagtggggacgtggagaacctttgtgt

SEQ ID NO: 7798 - DNA, 71 bp, homo sapiens
gaagaggaagagggaggtgtaaggaacttatcagcttcccaagatgtggagcggaagaggaagagggaggt

SEQ ID NO: 7799 - DNA, 105 bp, homo sapiens
tctacacttttcctgaaacccaagcagactctcatgggttttaggaaaagtttttggtttcatatctacatatctacacttttcctaaaacccaagcagactctc

SEQ ID NO: 7800 - DNA, 111 bp, homo sapiens
caggtttttgagaatgcgtcagtaagcgccaataaatctgatttttctcagtcctccttatggtttaagaggacaggcaagggtgcaggtttttgagaatgtgtcagtaag

SEQ ID NO: 7801 - DNA, 90 bp, homo sapiens
ctctgtgtctagctacaggattgtaattaaaccaatcagcactctaaaaatgcaccaatcaatgctctgtgtctagctaaaggattgtaa

SEQ ID NO: 7802 - DNA, 111 bp, homo sapiens
atccgcccgcctcggcctcccaaagtgctgggattacaggcgtgagccaccgcgcgcggcctcgatctcttgatcttgtgatccgcccgcttcggcctcccaaagtgctgg

SEQ ID NO: 7803 - DNA, 100 bp, homo sapiens
tccttccttaccttagacaacctaagcagtaaataaaaaatcacaaccagcaagaaaacaaaccagaagagcaatccttccttaccttagacaaccctaa

SEQ ID NO: 7804 - DNA, 98 bp, homo sapiens
agagggactttttggcttaatttactagacagtttttgtgaaaccaattttgaatgacaaaaattgcagagagggaccttttggcttaatttactaga

SEQ ID NO: 7805 - DNA, 226 bp, homo sapiens
tcccgatttcctaggcctggtattttgggaattaggaaaagagctggctctatgttcatcccgatttcctaggcctggtattttgggaattaggaaaagagctggctctatgtccgtcccgatttcctaggcctgttttgggaattagaaacagagctggctctatgtccgtcccgatttcctaggcctggtattttgggaattaggaaaagagctggctctatgt

SEQ ID NO: 7806 - DNA, 81 bp, homo sapiens
tcttaacatattttgaaaggcctttcaaaatatgttaaaagataaaatttattatgtctcttaacatattttgaaaggcct

SEQ ID NO: 7807 - DNA, 116 bp, homo sapiens
gacaaacatcagctagatatttactagagagtaaatatcaaactactattggtcaataacaacatgtttgctactagacaaacatcagctagatatttactagacagtaaatatca

SEQ ID NO: 7808 - DNA, 74 bp, homo sapiens
gttcctgccttaactgatgacattccaccacaaaagaagtgaaaaggcctgttcctgccttaactgatgacatt

SEQ ID NO: 7809 - DNA, 74 bp, homo sapiens
cacaaaagaagtgaaaatggctggttcatgccttagctgatgacattccaccacaaaagaagtgaaaacggctg

SEQ ID NO: 7810 - DNA, 118 bp, homo sapiens
atgattggtccattttacagagtgctgattggtccattttacaaacctctacctggccacaaagcgctgattggtgtgtttctacagagcactgattggtgcattttacaaacctcta

SEQ ID NO: 7811 - DNA, 204 bp, homo sapiens
tgctgattggtccattttacagagtgctgattggcgcattttacagagcactgattggtccattttacagggtgctgattggtccattttacaaacctctagctagccacagaaccctgattgatgagtttttacagagtgctgattggtgcattttacgaacctctagctagccacagagtgctgattggtgcgttttgcaat

SEQ ID NO: 7812 - DNA, 95 bp, homo sapiens
aaatgttaaccattgttataaatgctatcaatacgtaagtgcatattatgtaacctaaacaataggcaaatgttgaccattgttataaatgctat

SEQ ID NO: 7813 - DNA, 77 bp, homo sapiens
ctgacctggagttggcttatttaagtgattttaatgatcacctaggattttatactgacctggagttggcttatttg

SEQ ID NO: 7814 - DNA, 184 bp, homo sapiens
ttctgtcttgcaagaggattgtaaaacgcaccaatcagcactctgtagctacgattgtaaaacgcaaatcagcaccctgtggctagctagaggtttgtaaaatgcaccaatcagcactctgtaaaaacgcaccaatcagctctctgtggctagctagaggtttgtaaaatggaccaatcagcac

SEQ ID NO: 7815 - DNA, 104 bp, homo sapiens
aagtgctgggattacaggcgtgagacactgcgcctggccgtccaggctggtcttgacttcctttcgcttgtagcctcccgaagtgctggaattacaggcgtgag

SEQ ID NO: 7816 - DNA, 86 bp, homo sapiens
cacttcagcctgtgtgacaagagtgaagttgcatgagccaagatcacaccattgcacttcactgcagcctgtgtgacaagagtgaa

SEQ ID NO: 7817 - DNA, 88 bp, homo sapiens
caactcttgggctcaagtgatcctcctgcctcaatctctgttgccccggctggtctccaactcctgggctcaagtgatcctcctgcct

SEQ ID NO: 7818 - DNA, 106 bp, homo sapiens
acccttaggcagcctagaaagaaaaacagagaaaatcaaaccgaaagctggttcttagaaaaagtcaataaagttgacacacccttaggcagcctagaaaaaaaaa

SEQ ID NO: 7819 - DNA, 87 bp, homo sapiens
cattattttacagtttttaatattaagtaatgattatcacttaagtaatgggtattgcattattttacagtttttaatattaagtaa

SEQ ID NO: 7820 - DNA, 84 bp, homo sapiens
tgactctgtatctgtagataggtagatatctcctatcggttctgtctctctggaggacctgactctgtatctgtagatagatag

SEQ ID NO: 7821 - DNA, 350 bp, homo sapiens
ttacattatacaattaattatatacggtaagatatatatttatatctttattaattatatatcttacagtatatatgtattattatatataatcttataaacatatgcaacaaaaacctacttaaaggacaaattttaataaagttggaaatgaagaattggtttactgttaccattgaaaatgttctctgtttatacaaataaaattatataatgtataattatataatgtaagatatataattacattatatatataatgtaagattacattatatatgtaatgtaagatatagttacattatatatgtaatgtaagatatagttacattatatatgtaatgtaagat

SEQ ID NO: 7822 - DNA, 150 bp, homo sapiens
tctttcagggcacccagggcagtgcacccaccgttcagagcaatgctccacagttagtgcctgggggctgcggcggccctccccaccccacacacgctggcatctttcagggcacccagggcagtgcacccaccgttcagagcaatgctc

SEQ ID NO: 7823 - DNA, 198 bp, homo sapiens
ggggctgacatgaggtcaagggactgggatgatggcctcacaatgtggcactgcggagacaggacagcctgagtgggggcctacacgaggtcagggggctgggatgatggcctcacaatgtggcactgcggagacaggacagcctgagtggggcctacacgaggtcagggggctgggacgatggcctcacaatgtggc

SEQ ID NO: 7824 - DNA, 109 bp, homo sapiens
gggggcactcgccatccctggcatcctgagtgcccagtcccactctcacacacagtagatcctcagtaggtgttgatggggggcactcgccatccctgtcatcctgagt

SEQ ID NO: 7825 - DNA, 98 bp, homo sapiens
agcaagggctctgcctaaagcgtgctgttgcatgggaagaacagtgaacatttcctcctagagtgaggaaagcaagggctctgcctaaagcatgctgt

SEQ ID NO: 7826 - DNA, 88 bp, homo sapiens
cccctcgtcacccagaaccaagtgacaaacagagtatcctcatgtgcaagcacaggactcacccctcgtcacccagaacctagtgaca

SEQ ID NO: 7827 - DNA, 132 bp, homo sapiens
caccaccctaacagtgtgggcagggcccttcctgttccgccaggtttacgaggacagaccaagccacgcgcacaccccgcactctgctcctgcctcaccaccctaacagtgtgggcagggcctttcctgttc

SEQ ID NO: 7828 - DNA, 115 bp, homo sapiens
ccgccttatcatgcttgtattgcttcagactcagtgccacctgcgagcagccctgtccctccatcagtcggccgccttatcatgcctgtattgcttcagactcagtgccacctgc

SEQ ID NO: 7829 - DNA, 75 bp, homo sapiens
cggcccctctcttagggaacttatcgtgcattgttctcagcgtcgggcctcggcccctctcttagggaacttatc

SEQ ID NO: 7830 - DNA, 114 bp, homo sapiens
cacctgctgccaccattcccgtccccccaccctaagtccacaccacccgctgccaccgttcccgtccccccaccctaagtccacaccaccagctgccaccattcccgtcccccc

SEQ ID NO: 7831 - DNA, 103 bp, homo sapiens
acacagccatcaaactaatacttcacacacacacacgcacactgccatcacactaatacaacacacacacacacacgcacactgccatcaaactaatacttca

SEQ ID NO: 7832 - DNA, 135 bp, homo sapiens
ccaatggctatagtttgccaattccagaagtaaattttgtccaccgagttccagtaaaacttcacaaaaacaggaggcaggccggatttgacccaatggctatagtttgccaactccagaagtaaattttgtcca

SEQ ID NO: 7833 - DNA, 123 bp, homo sapiens; identical to SEQ ID NO: 3488

SEQ ID NO: 7834 - DNA, 175 bp, homo sapiens
atatatatatgaaacatatatgaaatatatatgaaacatatatgaaatatatatatgaatatgaaaagcaaggagtatgaaacttatatatgaaatatatatgtatgaatatgaaaagcagggaaaaggggacagtcatttagtgttgctgctgaaaatttcaatatgaaaaacg

SEQ ID NO: 7835 - DNA, 117 bp, homo sapiens
gacaaaagtgtatattttaaaaagaaagaatatatatttaaaatgacaaaagtgtatattttaaaaagaaagaatatatatttaaaatgacaaaagtatatattttaaaaagaaaga

SEQ ID NO: 7836 - DNA, 76 bp, homo sapiens
tggtgcacaccccaggctccaggaggaggtgaccgaggggcagctggggaacatggcgcacaccccaggctccagg

SEQ ID NO: 7837 - DNA, 100 bp, homo sapiens
gcctcagccccgcgggcgcgccccaggaaaccatggcctcagccccgcgggcggccccgcaccccaggaaaccatcgcctcagccccgcgggcggccccg

SEQ ID NO: 7838 - DNA, 157 bp, homo sapiens
caccaatcggcactctgtatctagcacaaggtttgtaaacacaccaatcagcactctgtgtctagctcagggtttgtgaatgcaccaatcgacactctgtatctagctactctggtggggacttggagaacctttgtgtggacactctgtatctagc

SEQ ID NO: 7839 - DNA, 204 bp, homo sapiens
gggaccacaggcatgtaccactacgctcggctaacttttcgattttttgtacagcccaggctgctcttgaacccctggcctcatgggatcctcctgcaagtgttgggattacaggtgtgagccaccatgctcggccaaggcattacaggtgtgagccaccatgctcggcctagggattacaggtgtgagccaccatgctcggcc

SEQ ID NO: 7840 - DNA, 123 bp, homo sapiens
gagacgcggcagaggcagggccggggaggggccgtgtgggggagccctggagccctgtctgcgagttaccctgatggacagagagacgcggcaaaggcagggccggggaggggccgtgtgggg

SEQ ID NO: 7841 - DNA, 85 bp, homo sapiens
tgggggcagcttttcctctcctccttagcctcatcaggtggaacacggtggggtcgggatgggggcagcttttcctctccccctt

SEQ ID NO: 7842 - DNA, 111 bp, homo sapiens
tgctcaccggcagcacacgggggttcctgtcccgcagaaccaccaagctgttctccacggaggccacaccctctaacgtgctcaccggcagcacacgggggttcctgtccc

SEQ ID NO: 7843 - DNA, 79 bp, homo sapiens
gcgcccaccagacaggccacagccaccccccacacgctccggcccaccccacccagcgcccaccaggcaggccacagcc

SEQ ID NO: 7844 - DNA, 190 bp, homo sapiens
gcctcacctcagggactctggggctggaacccacgtctcggctgagggcacggtggcagctgcctccagtcgggccccggtggggactccgggtctggaacccgcgtctcggctgaggacacggtggcagctgcctccggtctgggccccggtggggactccgggtctggaacccgcatctcggctgagg

SEQ ID NO: 7845 - DNA, 147 bp, homo sapiens
ctgtgccgtctgcctcattcctcactccttgagtttcctgtgggctggggttgagggggttcagcccagtctccacccagcaccctcagccagctcgtctgtgccgtctgcctcattcctcactccttgagtttcccgtgggctggg

SEQ ID NO: 7846 - DNA, 84 bp, homo sapiens
ttgagctccgggtctgttatggccattgctctgcacagccagctctgggatcccctgaatattgagctccgggtctgttacggc

SEQ ID NO: 7847 - DNA, 120 bp, homo sapiens
cacacgcttcctcacgtctactcgctcccacacgcgtgagcactctaggggaggcctggggactcaggccgccgcacacgcttcctcacgtctactcgctcccacacgcgtgagcactct

SEQ ID NO: 7848 - DNA, 77 bp, homo sapiens
acataggacacaggaattcctgggtccttgcccatgactgtgccatgtggtaggacacaggacacaggaattcctgg

SEQ ID NO: 7849 - DNA, 92 bp, homo sapiens
tgaatcttgccgtatggggaggctttggccccgagagctgcctggcacatcccgggaagagggtgaatcttgccgtatggggagcctttggc

SEQ ID NO: 7850 - DNA, 86 bp, homo sapiens
ggtggcatctccccagcagggtggccccgcgcccttgccagccccggaggaccagatggtggcatctccccagcaggctggccccg

SEQ ID NO: 7851 - DNA, 94 bp, homo sapiens
cccgggaggctgggctgtgtgggcgcatatgatcagcaggcccctcaaacacccgatgtgcagggagagtgcccgggaggctgggctgtgtgtg

SEQ ID NO: 7852 - DNA, 142 bp, homo sapiens
ggaggccctgtgggagctactcctccaggccattctgcaggtggggccagcggggcaggtggggctggcccgtggtcactgatgctgccctgcagggtgctggaggccctgtgggagctactcctccaggccattctgcagg

SEQ ID NO: 7853 - DNA, 77 bp, homo sapiens
cttccttgaaagaattttttgtttttgtttttgagatggtttggttaacatcttccttgaaagaatttttttttttt

SEQ ID NO: 7854 - DNA, 97 bp, homo sapiens
agttactgaacattgttcacagataaccttgtacacacaagaaatggatatatttcatgtgagttactgaacattgttcacagataaccttgtacac

SEQ ID NO: 7855 - DNA, 101 bp, homo sapiens
aggaggttgggagggtgcccgcttctctgctctgtgcccattagcctcgccgcacaccctaggaccattgactttggaggaggttgggagggtgcccactt

SEQ ID NO: 7856 - DNA, 94 bp, homo sapiens
agggccagggccatgggggacgggagcggggtggggggacagcagaagcagggagcattttacagatagggccagggccacgggggacgggagc

SEQ ID NO: 7857 - DNA, 225 bp, homo sapiens
gaaccaggccctggggcccagccctgcctcagccctgcatctctcctagccctgcctcagcccctgcatctctccctccctcctcccgtagaaccaggccctgggggccagccctgcctcagccaggaggttgggagggtgcccgcttctctgctctgtgcccattagcctcgccgcacaccctaggaccattgactttggaggaggttgggagggtgcccactt

SEQ ID NO: 7858 - DNA, 86 bp, homo sapiens
agccgcgctgctggctgcagggcacctggatgacaggcattccttggccaacacatgcttcagccgcgctgccggctgcagggcac

SEQ ID NO: 7859 - DNA, 112 bp, homo sapiens
ccttcccagagcggagggtcacctgctgagctgggcacgggcttctcgtgggctctggccacggccctgagctcctccccttgccttcccagagcggagggtcacctgctga

SEQ ID NO: 7860 - DNA, 100 bp, homo sapiens
tctgtcctcagcacacagtaggcacctgtagatggcacacgtggcgtttcctccgcccgagggccagggctctgtcttcagcacacagtaggcacctgta

SEQ ID NO: 7861 - DNA, 81 bp, homo sapiens
ggggtctgggccatccctgagtgcagggacatgggggtccagttgtcgtggtgggggtctgggccatccctgagtgcaggg

SEQ ID NO: 7862 - DNA, 108 bp, homo sapiens
cctcactgacagctaggagaggaatgagactctcctctgggtcactcggtggtaggggtgagctggggtggcctcactgaccgctaggagaggaatgagactctcctc

SEQ ID NO: 7863 - DNA, 98 bp, homo sapiens
tgcactccagcctgggcaacaagagtaaaactccgtctcaagcagagcttgcagtgagctgagatcgtgccactgcactccagcctgggcaacagagc

SEQ ID NO: 7864 - DNA, 79 bp, homo sapiens
ggagggccgcgccatgctgactgcttgaacctctgctgacctgacagtgctggcgggagggccgcaccatgctgactgc

SEQ ID NO: 7865 - DNA, 140 bp, homo sapiens
gtgacatgtgaattacatctcaataaagctttcttttgtttgttttgtgtttttctttttgacacagggtctcaccctgtcacccaggctgggtgacaggtgaattacatctcaataaagctttcttttgtttgttttgt

SEQ ID NO: 7866 - DNA, 145 bp, homo sapiens
cttactgctgtgttggtacagccctggagccaccccttactgctgtgttggtacaaccccgggtcccctcacttactgctgtgttggtacagccctggaccccccccccccgctccaacttactgctgtgttggtacagccccgg

SEQ ID NO: 7867 - DNA, 107 bp, homo sapiens
gttttaggagctctgtgtcaggaactgaggttaaagaccaatatcagaatgaaggattctcctagtgcccccatctacaaaggttttaggagctctgtgccaggaac

SEQ ID NO: 7868 - DNA, 84 bp, homo sapiens
cccactccagcctgagacgctgtctcaataaaaaaaaatacacacacacccacccacccactccagcctgagaccctgtctcaa

SEQ ID NO: 7869 - DNA, 112 bp, homo sapiens
ccaacctgggtgacagagtgagatcctgtctcaaaaaaagaaaaaaaaagttttggaactatgtgttactgcacccaacctgggtgacagagtgagaccctgtctcaaaaaa

SEQ ID NO: 7870 - DNA, 75 bp, homo sapiens
aaaggttctccaggtccccaccagattagctagatacagagtgtcgacataaaggttctccaagtccccaccaga

SEQ ID NO: 7871 - DNA, 73 bp, homo sapiens
gacacaaaagttctccccctccctactagattagctagatacagagggtggacacaaaagttctccacctccc

SEQ ID NO: 7872 - DNA, 96 bp, homo sapiens
aatgagtggataaagaaactatggtgtgtgtgtatatatatacacacacaccatatataaagaaatgagtggataaagaaactatggtgtgtgtgt

SEQ ID NO: 7873 - DNA, 99 bp, homo sapiens
cagtggtagtaataatataatattagtaataatgtagttgtaataaatgtaatatagtaagaagcagtagtagtaatagtagtaataatgtagttgtaa

SEQ ID NO: 7874 - DNA, 106 bp, homo sapiens
tctccagcctgtcttgagtttcagatctcagcttgcttctccaaggaggtccacatccagcccagggaatattggtctccagcctttcttgagtttcagatctcag

SEQ ID NO: 7875 - DNA, 97 bp, homo sapiens
ccatgcattcatttacagttactgaggacagaacctggttggtccagccctgcccaccacactgattacgacccatgcattcatttacacttactga

SEQ ID NO: 7876 - DNA, 109 bp, homo sapiens
gagaagagatgagatgaaattgggagacagagggagagagaggctggtggctgtacagtaaaggtattgagaagagataagatgaaattgggagacagagggagagaga

SEQ ID NO: 7877 - DNA, 82 bp, homo sapiens
ctgcctctggtcaatgccacccaccagaattggactctaatggatagatcttcctagcactgcgtctggtcaatgccaccca

SEQ ID NO: 7878 - DNA, 124 bp, homo sapiens
ttttttgctttaagccattaaacatattttaatgaactcaagagtatagaaagctcttcatgcaatttcctttttttttttttttgctttaagccattaaacatattttaatgaactcaagagt

SEQ ID NO: 7879 - DNA, 113 bp, homo sapiens
atggaaatgtaagaagtttaacgcaagtaaaaaaaacatctaacaatgataaaggaagataccatcgggcagattcagaccttatggaaatgtaagaagtttaacgcatgtaa

SEQ ID NO: 7880 - DNA, 96 bp, homo sapiens
tctagtaatcatacagacttgtcacattttaatttagcccaagtttaatatgatttacttatctagtaatcatatagacttgtcacattttaattt

SEQ ID NO: 7881 - DNA, 116 bp, homo sapiens
atgaaacccaatttataaaagagctacccagaattgcagcaaatgcacggatactcccatctcaaatgcacacctacaacatgagctatgaaacccagtttataaaagagctaccc

SEQ ID NO: 7882 - DNA, 95 bp, homo sapiens
ctgctgtaacaaatactcccaaaacctatgaaatcaaatgacagtgtattcatcagatgagatggggtatactgctgtaacaaataatcccaaaa

SEQ ID NO: 7883 - DNA, 87 bp, homo sapiens
tgttcactatgattgtggtatgtggtgatggaatagggaatatgtgtttgcagtgggtttgttcactatgactgtggtatgtggtga

SEQ ID NO: 7884 - DNA, 101 bp, homo sapiens
cacccttaatccctgcacacacagacacacatgcacacacattgttaatccctgcacacacaaatccccgcagacacacacccttaatccctgcacacaca

SEQ ID NO: 7885 - DNA, 104 bp, homo sapiens
tcctactgtggctgagctggtattcaagttgaaagacaaggtcctaaaataggggcctcaggactctgcccagtgtcctgtcctactgtggctgagctggtgtt

SEQ ID NO: 7886 - DNA, 104 bp, homo sapiens
agggggcagcccctggagctcaggggaccagggcagagcagtcgcaggtgagcacgggttggtgggaggtagaacgagtagggggcagctcctggagctcaggg

SEQ ID NO: 7887 - DNA, 112 bp, homo sapiens
atgggtgaaattcacttagaactgcttgacttgagtgactctaaatttagaacctccagtccactgtagccacccattcccatgggggaaattcacttagaactgcttgact

SEQ ID NO: 7888 - DNA, 311 bp, homo sapiens
atgccctttaccatcatgacgcccgcaggcgggaccacccggcactgtagacagctgccctttacaatcatgactcatagaaactacggcactctggccgtggccgacgttgctcctccgaagcatggcgccggcgggagttgtaacccgggctgtccggagcggggagctgcccctcacaagcatggcgtcagctgaaaatgaagcctgtgctgtgcggagcgtcgcctgcccctcacaagcatggcgtctgcagaaggtgctgtgcggccgctgcggggcggccagctgcccttcacaaacatggcggc

SEQ ID NO: 7889 - DNA, 104 bp, homo sapiens
tttggattaccagccacagcaggcagaattctaagatgttcccaaagtgatagtcttaatccacaggaagaatatttggtttggattaccagccacagtaggca

SEQ ID NO: 7890 - DNA, 65 bp, homo sapiens
taaataatttcatttaaaatttaatgtctaatacctaaattaaataatttcctttaaaatgtaat

SEQ ID NO: 7891 - DNA, 106 bp, homo sapiens
ggccagaacttcatgacatggccatttccaggctgatgaagagggcagcaggtacttgtgactaattcaaaccaatgggccagaactgcatgacatggccatttcc

SEQ ID NO: 7892 - DNA, 100 bp, homo sapiens
gtaacgatgtatttttgtgaatgagagttggcatgcataacaatgaacaatgtacaaatgcaaatgtaacaatgtatttttgtgaatgagagttggcatg

SEQ ID NO: 7893 - DNA, 110 bp, homo sapiens
ttgctatggcctcactcggtgtttcttgggcaggtgactttctcttaacttccagctgggggcttgagcatttgatgtaggggaattgctatggcctcacttggtgtttc

SEQ ID NO: 7894 - DNA, 105 bp, homo sapiens
gctctgtcgctcaggctggagtacagaacttactaaatgccactgaattatcttttttttttttttgagacagattctcgctccgtcgctcaggctggagtacag

SEQ ID NO: 7895 - DNA, 100 bp, homo sapiens
aagtgaagttacaaagttatttacttggcatacaccccatggaaatgaagaggatgtttcctgccatagctgaagtgaagttacaaagttatttagttgg

SEQ ID NO: 7896 - DNA, 106 bp, homo sapiens
gggaggtgtcttgagattatcatccgctgagggtggagctgagggtggaaggggagtgagcagacactcgggaggtgtcttgagattatcatccgctgagggtgga

SEQ ID NO: 7897 - DNA, 94 bp, homo sapiens
agccattacaccaggcggaaaatggtaagaaaaaaaaacagcagagcaaggtgctgagattacaggcacgagccattacaccaggctgaaaatg

SEQ ID NO: 7898 - DNA, 116 bp, homo sapiens
aatttgaaattattttgttcactaccctttcctttgaaatgtttggtcttaattcatagcgctatgagattattaggtaaatttgaaattattttgttcactaccatttcctttga

SEQ ID NO: 7899 - DNA, 111 bp, homo sapiens
atgtggaatgattaaatctgtctaacaaataattgtatatatttatggggtacagtgtgacattttgatacatgtttacaatgtggaatgattaaatctgtccaacaaata

SEQ ID NO: 7900 - DNA, 113 bp, homo sapiens
ggttcatggatacttatactttttcttgggatacccaagggccttcagttgtatcggtaatattttacttatttgcctatttattaggttcctggatacttatactttttctt

SEQ ID NO: 7901 - DNA, 102 bp, homo sapiens
gggcaggcaacgaccttgacattttctttttcttttttttctttttttttttttgagacagagtctcgggcaggcaacaaccttgacattttctttttcttt

SEQ ID NO: 7902 - DNA, 109 bp, homo sapiens
aagtcagtccagccaaggattggcataaattagcccagtttgctacaaatatagtctgcttctaatgccttcgtccaagtcagtccagccaaggattggcataaattag

SEQ ID NO: 7903 - DNA, 124 bp, homo sapiens
cctgtaatcccagcactttgggaggccgaggcgggtggatcacaaggtcaggagattgagaccatcctggctaatacagtgaaaccccgtctcctgtaatcccagcattttgggaggccgaggc

SEQ ID NO: 7904 - DNA, 72 bp, homo sapiens
aactttagcaaatatttagcatatatttagcataatattgctaaagctaaactttagcaaatatttagcata

SEQ ID NO: 7905 - DNA, 72 bp, homo sapiens; identical to SEQ ID NO: 7904

SEQ ID NO: 7906 - DNA, 121 bp, homo sapiens
tggtctgacccccctctggggtcactgtagcagcttcccagctgggcttcgcttcttaccacgtggccctcagccctggtctgacccccctctggggtcactgcagcagcttcccagctgg

SEQ ID NO: 7907 - DNA, 109 bp, homo sapiens
gggtgcggtggctgctcttttggctcctcttttggctcctgctgggatttatcagccatcagtccacctgtgtgagtagatgggtgctgtggctgctcttttggctcct

SEQ ID NO: 7908 - DNA, 173 bp, homo sapiens
attcttcgttagtttcttcagattatcatccactgagggtggaaggggagtgagcagacacacttgggaggtgtcttgagattatcatccgctgagggtggagctgagggtggaaggggagtgagcagacacactcgggaggtgtcttgagattatcatccgctgagggtgga

SEQ ID NO: 7909 - DNA, 142 bp, homo sapiens
attccacagataagtgagatcacacagcatttgtctttctctgtctgaattagttcacttagctaattctactctttttgtatgagttcaacgtttttaaattccacaaataagtgagatcacacagcatttgtctttctct

SEQ ID NO: 7910 - DNA, 97 bp, homo sapiens
aggagccaaaagagcagccacagcacccatctactcacacaggtggactgatggctgataaatcccagcaggagccaaaagaggagccaaaagagca

SEQ ID NO: 7911 - DNA, 112 bp, homo sapiens
aaatcttgcctagatttaaaaaaacattttaaaataaaaattttaaaacaaaacattttaaaataaaaaatttaaatataaatttaaaatcttgcatagatttaaaaaaaca

SEQ ID NO: 7912 - DNA, 109 bp, homo sapiens; identical to SEQ ID NO: 7907

SEQ ID NO: 7913 - DNA, 109 bp, homo sapiens; identical to SEQ ID NO: 7907

SEQ ID NO: 7914 - DNA, 142 bp, homo sapiens
agagaaagacaaatgctgtgtgatctcacttatttgtggaatttaaaaacgttgaactcatacaaaaagagtagaattagctaagtgaactaattcagacagagaaagacaaatgctgtgtgatctcacttatctgtggaat

SEQ ID NO: 7915 - DNA, 88 bp, homo sapiens
gctaagagcaaggcagtctggaagatgcagtctagctgttccattggcctggtcacatggtcacagctaagagcaaggcagtctggga

SEQ ID NO: 7916 - DNA, 125 bp, homo sapiens
acaaggtcaagagtttgagaccagcctgaccaacatggtgaaaccccgtttctactaaaaatgcaaaagcaggtggataacaaggtcaagagtttgagaccagcctgaccaatatggtgaaaccc

SEQ ID NO: 7917 - DNA, 89 bp, homo sapiens
ctcactctattatgcaggctggagttttttttttttctttttctttttctttttgagacaaaacctcactctattacgcaggctggagt

SEQ ID NO: 7918 - DNA, 81 bp, homo sapiens
acagagccaaatcataagtgaactctgactcacaattgctataaagagaataaaatacagagccaaatcataaatgaactc

SEQ ID NO: 7919 - DNA, 105 bp, homo sapiens
tagattacatagatatatagattagctatagatatatagattagatagatacatagatgagattagacacatcgattagctagattacatagatacatagattag

SEQ ID NO: 7920 - DNA, 142 bp, homo sapiens; identical to SEQ ID NO: 7909

SEQ ID NO: 7921 - DNA, 97 bp, homo sapiens; identical to SEQ ID NO: 7910

SEQ ID NO: 7922 - DNA, 97 bp, homo sapiens; identical to SEQ ID NO: 7910

SEQ ID NO: 7923 - DNA, 109 bp, homo sapiens
caatcagcaggtaccaggactttaagataagtaaggggatgtgttggtgtggtctttacagcaatcttttatcaatcagcaggtaccaggactttaagatgagtaaggg

SEQ ID NO: 7924 - DNA, 100 bp, homo sapiens
agaagctgatgggagcagatacaccttattgcaacataaagggtacctcaacatagccctgttttgaagtgaattattgaagctgatgggagcagataca

SEQ ID NO: 7925 - DNA, 115 bp, homo sapiens
actactaatagcctactgttgacttaacagtcacacaaattttgtatatgtattatatactcgaaacttaactactaataccctactactaatagcctactgttgacttaccagt

SEQ ID NO: 7926 - DNA, 92 bp, homo sapiens
aatgaagctggggctctgagagcctcacacaaccatgagagttggtgttgccattctcctcatcttagaaatgaaactggggctctgagagc

SEQ ID NO: 7927 - DNA, 188 bp, homo sapiens
gtgttagagactgggtttcaccgtgtgtgtgtgtgtgtgtgtgtgtgtgtgtgtgtgtgtgtgttagagactgggtttcaccatgttgcccgggtggtctcgaactcctggtgttagagactgggtttcaccgtgtgtgtgtgtgtgtgtgtgtgtgtgtgtgtgttagagactgggtttcaccatgt

SEQ ID NO: 7928 - DNA, 92 bp, homo sapiens; identical to SEQ ID NO: 7926

SEQ ID NO: 7929 - DNA, 187 bp, homo sapiens
gtatcccctccccagaggcacttactatattggtactcacagtgcaagtggcttcatggagggagagaggcgtatcccctccccagaggcacttaccatattggtactcacagtgcaagtggcttcatggagggagagaggcgtatcccctccccagaggcacttaccatattggtactcacagtgc

SEQ ID NO: 7930 - DNA, 132 bp, homo sapiens
aaatccctaaccattaagtagggttgacattcaggtaggtttgaaagctactgtttgaaagttacagagcagagaacaatacaaaatccctaaccattaagtagggttgacattcaggtggtttgaaagctt

SEQ ID NO: 7931 - DNA, 136 bp, homo sapiens
ctggccaggccttagcttttaatgctgagattttgccacttggaggctgtgcgactctagacaagtgattagcttttaatgctgagcttagcttttaatagacaagtgaatagacaagtgattagcttttaatgct

SEQ ID NO: 7932 - DNA, 103 bp, homo sapiens
tagacaagtgattagcttttaatgctaatcactttaataatgcttttaataataataatgcttttaatgcttaataatagacaagtgattagcttttaatgct

SEQ ID NO: 7933 - DNA, 186 bp, homo sapiens
agttagatacagagtttcgattggtgcactcacaaaccttgagctaaacacagggtgctgattggtgtgtttacaaaccttgagctagatacagagtgctgattggtgtatttacaatccttgagctagacataaaggttctccaaggccccaccagagcagctagatacagagtgttgattggtg

SEQ ID NO: 7934 - DNA, 96 bp, homo sapiens
acaggcctggactgagaagtggggctacaggctacaggtgcttgataccccgggggggccctggaacaggcctggactgagaagcggggctacagg

SEQ ID NO: 7935 - DNA, 169 bp, homo sapiens
tgtgcagtgagatgtcagtctggtgcgcgtgggtaacaggcaggtgtgcagtgaggcgtcagtctggtgcacgtgggtaacaagtgggtgtgcagtgaggcgtcagtctgtacacgtgggtaacaggtggatgtgcagtgaggtgtcagtctggtgcacgtgggtaaca

SEQ ID NO: 7936 - DNA, 109 bp, homo sapiens
taatcccagcactttgggaggccaaggtgggtagatcacttgaggtcaggagttcaagaccagcctggctcacacctgtaatcccagcattttgggaggccaaggtggg

SEQ ID NO: 7937 - DNA, 109 bp, homo sapiens
tagctagacacagagcgctgattggtgtatttataaaccattagctagacacagagcactgattggtgcgtttacaaacctttaagtagacacagagtgctgattggtg

SEQ ID NO: 7938 - DNA, 86 bp, homo sapiens
cctgtctctattaaaggaatagagtctggacgtgcactccagcctgggcagcattgtgagatcctgtctctataaaaggaatagag

SEQ ID NO: 7939 - DNA, 102 bp, homo sapiens
tccataatctcatcccctcagaaaaatcctataccaaagtaacaatttatactgttcaaaatatatatgcctccataatctcatcccctcagaaaactccta

SEQ ID NO: 7940 - DNA, 144 bp, homo sapiens
gaggagaagcagctgatgctatagctgttctgtccaatatggcagccactggaccactttgaggaggagcaattgatgccatgaacaactctgaggagaagcagctgatgctatagctgttctatccaatatggcagccactgg

SEQ ID NO: 7941 - DNA, 88 bp, homo sapiens
agtttgcctcctgattcttcatttaactgctgtatggactgtatgaaaatcagacatatttgagtttgcctcctgattattcatttaa

SEQ ID NO: 7942 - DNA, 92 bp, homo sapiens
ttggtcaccactcaagtgaccacctagactggggggaaggagacaaggataatacccacatttcgagcttggtcaccactcaagtgaccaac

SEQ ID NO: 7943 - DNA, 101 bp, homo sapiens
gggagctgtcccttcggcaccacggaccttaaagcctaggcgttaagacgacggaggcggggcaacaggcggggagctgtcccttcagcaccacggacctt

SEQ ID NO: 7944 - DNA, 93 bp, homo sapiens
gtgattgtgccactgtactccagcctgagtaacagagcaaaactcttgtctctttaaaaaaagagaaaaagtgattgtgccactgcactccag

SEQ ID NO: 7945 - DNA, 127 bp, homo sapiens
tatatttaaagtaagtataagtaaaggaataagggggaaatatactcttgtggggagtatatttaaggtaagtaaagtaattatatttaaagtaagtataagtaaaggaatagggggaaatatactt

SEQ ID NO: 7946 - DNA, 80 bp, homo sapiens
acattccctgtgtgaaatgcgtagaatgaatttctagcaatccctggtccatcacattccctgtgtgaaatgagtagaat

SEQ ID NO: 7947 - DNA, 82 bp, homo sapiens
taattaatttcaactggatagttactttatgtaattaatagtaattactttatgaattaataatttcaactggatagttact

SEQ ID NO: 7948 - DNA, 93 bp, homo sapiens
cttggcctcccaaggtgctgggattacaggtgagtcactttgcccagcccctctcccatcttggcctctcaaggtgctgggattacaggtgag

SEQ ID NO: 7949 - DNA, 138 bp, homo sapiens
tatagtaccagctactcaagaggctgatgcaggagaatcactaaaccgcatctctactaaaaatacaaaacttagccaggcaaggagccgggtgactatagtgccagctactcaagaggctgatgcaggagaatcact

SEQ ID NO: 7950 - DNA, 114 bp, homo sapiens
tttatatgttacaacatgattgaaccctaaaaacatgccacaaactgtgtatgactccattgatatgagaggaatggtttacatgttacaacatgattgaaccctaaaaacatg

SEQ ID NO: 7951 - DNA, 101 bp, homo sapiens
gcaggtggtgtgccccgccatgctatggtgccgagggaaggcagggccatcgtgggctcgtgtgtcttttatccccctgcaggtggtgtgccccgccatgc

SEQ ID NO: 7952 - DNA, 93 bp, homo sapiens
ccatcttctctagtgttgcatttggatgttgaaaagtggttctgtttttataccatcaaatgtacccatcttctcttgtgttgcatttggatg

SEQ ID NO: 7953 - DNA, 91 bp, homo sapiens
ctccggtcctcatccactctccatcgggaaggcttagactgtttccaaagtccggtgtccctttccctccggtcctcatccgctctccatc

SEQ ID NO: 7954 - DNA, 169 bp, homo sapiens
tgtagccacactgctgtgcggatttacggacctcacaatgttagccgtgcacatggaaataaaaacatgtagccaccctgtgctgtgcagattcacaaacctcgcagtccacagaacaccagctatgcacgtggaaaggagaatgtgtagccacgctgtgctgtgcaga

SEQ ID NO: 7955 - DNA, 118 bp, homo sapiens
gcctcccaaagtgctgggattacaggtgtgagccaccgtgcccggccccggtctcgaactcttgacctcgtgatccgcccgcctcagcctcccaaagtgctgggattacaggcgtgag

SEQ ID NO: 7956 - DNA, 70 bp, homo sapiens
ggacggggcggctggccgggcggggggctgacccccccacctccctcctggacgaggcagctggccgggc

SEQ ID NO: 7957 - DNA, 55 bp, homo sapiens
tatttttaaaaataatatttaaaaaacattaaaattttttttttaaataatattt

SEQ ID NO: 7958 - DNA, 81 bp, homo sapiens
atgtgggaaactttggaacttcctagaaacttggagggctcagaagacaggaaaatgtgagaaagtttggaacttcctaga

SEQ ID NO: 7959 - DNA, 157 bp, homo sapiens
catctggatggatggatggatgaatagatataaagataggtaggtaggtaggtaggtaggtagatagatagatagatagatagatagatagatagatagatagatgaagcgatgtctaagatatctggaaggatggatggatggatggatggatagt

SEQ ID NO: 7960 - DNA, 87 bp, homo sapiens
gccaccgacctctgagtgatggcactgtgccacaattcaccagggcacagggaagggagacagccacccacctctgagtgatggcac

SEQ ID NO: 7961 - DNA, 92 bp, homo sapiens
gggaagggagacggccaccgacctctgagtgatggcactgtgccacaattcaccagggcacagggaagggagacagccacccacctctgagt

SEQ ID NO: 7962 - DNA, 84 bp, homo sapiens
aaaaaaaaaaaaatatatatatatatatatatatatatatatatatatatatgcatatacacacacccacacatatacatatat

SEQ ID NO: 7963 - DNA, 87 bp, homo sapiens
agggcaggaccagagccagtgatacggcagggccagggctgtgccaggacagaacaagagcagagcagggcaggaccagagccaggc

SEQ ID NO: 7964 - DNA, 91 bp, homo sapiens
gcctgtaatcccagcattttggggggccgaagcaagaagatcacttgaggccaggtgcggtggctcaggcctgtaatcccagcactttggg

SEQ ID NO: 7965 - DNA, 74 bp, homo sapiens
tgacattccaccacaaaagaagtgtaaatggccggtccttgccttaactggtgatattccaccacaaaagaagt

SEQ ID NO: 7966 - DNA, 94 bp, homo sapiens
aggagctgggaaactcctgttttagtccaattttaaggagcatgctaaaatataaaacaaataagggaaaggagctgggaaactcctgttttag

SEQ ID NO: 7967 - DNA, 82 bp, homo sapiens
tggctggggcaggaaatgctttcctccaataacagtaaagctccaggcttctgcctccgtggctgggccaggaaatgctttc

SEQ ID NO: 7968 - DNA, 76 bp, homo sapiens
ctctgagggtagattcgagttaggatttggattaaaacattatcttaaaacctctgagggtagattcgagttagga

SEQ ID NO: 7969 - DNA, 118 bp, homo sapiens
gcccccaaaccacctcaggcactgtggactgccaagtcctgatgggcccccaaaccacctcaggcactgtagaccccaagcccttacgggcccccaaaccacctcaggcactgtggac

SEQ ID NO: 7970 - DNA, 113 bp, homo sapiens
ggacaggggtgggctgtgccaggatagactgcacctgccctttccaacaatgggacaggatcggagggcaagcgggacaggggtgggctgtgccaggataaactgcacctgcc

SEQ ID NO: 7971 - DNA, 80 bp, homo sapiens
ttttctggaaggggtgtgtggggtgggggtggaggatatcatatttatggattgtatttttctgaaaggggtgtgtgggg

SEQ ID NO: 7972 - DNA, 90 bp, homo sapiens
tgtgtctagctaaaggattgtaaacgcatcaatcagcactctgtaaaattgcaccaatcagcactctgtgtctaactaaaggattgtaaa

SEQ ID NO: 7973 - DNA, 98 bp, homo sapiens
aaaatgtgtttaatcttatccacatacatatctcaacatatcttaatatccatatccatatctcaataaatcaaaaatgtgtttaatcttatccatat

SEQ ID NO: 7974 - DNA, 113 bp, homo sapiens
tatatattagtttgaaaaatgaccaatatttatatattatatgatgaccaatttatatatataatatatgatatatatataatattatatattagtttgaaaaatgaccaata

SEQ ID NO: 7975 - DNA, 102 bp, homo sapiens
cagcgctctgtggctagctagaggtttgtaaaatgctccaatcagcactctgtaaaaacacaccaatcagcactctgtggctagctagaggtttgtaaaatg

SEQ ID NO: 7976 - DNA, 125 bp, homo sapiens; identical to SEQ ID NO: 1369

SEQ ID NO: 7977 - DNA, 79 bp, homo sapiens
tccaactaccagtgcacatcactggtggttggagggctaaacttgtagtctcacattccaactaccagtgcacatcact

SEQ ID NO: 7978 - DNA, 108 bp, homo sapiens
tgtattagagttccattttctctacacccttgccaacacttgttattgtctatataacaccatgtcacattcccactggcagtgtattagagttccagtttctctaca

SEQ ID NO: 7979 - DNA, 86 bp, homo sapiens
cccggttcctgcccgggacagggggccaagggtgcaacccaagctgcacgctgctacccggttcctgcccgggacaggggcccaag

SEQ ID NO: 7980 - DNA, 100 bp, homo sapiens
gaatgaggaaataggctcagagaggttaagtaactatattacacctaacagtatgccccactaacgaatgaggaaataggctcagagaagttaagtaact

SEQ ID NO: 7981 - DNA, 77 bp, homo sapiens
ctgctggttgagttggagggtggagagcagagccaggcccactctgccttcctgctggttgagttggagagtggaga

SEQ ID NO: 7982 - DNA, 114 bp, homo sapiens
tgcagactcctagcagcattttgatcttttcttttcttttcttttttcttttcttttctcttttcttttctttttgcagactcctagcagcattttgatcttttcttttctttt

SEQ ID NO: 7983 - DNA, 114 bp, homo sapiens
gggtgatctgaactttcctttctaaacgatccccctcctaggggtatatgggctgggctgggagtccgagggggtgatctgaactttcctttctaaatgatccccctcctaggg

SEQ ID NO: 7984 - DNA, 89 bp, homo sapiens
gccaccatgcccaactaatttttttttttttttgagatggagtcttgctggaattacaggctcgagccaccatgcccagctaatttttt

SEQ ID NO: 7985 - DNA, 104 bp, homo sapiens
cacaagacatcataacctcattgatctgtaaaagaataaaaaaagattataagaacatatacacagaacacatacacacaagacatcataacctcactgatctg

SEQ ID NO: 7986 - DNA, 103 bp, homo sapiens
ccttcacttcttcaggaatcacatacacacccatacgccacatcagctcccagcccccatatctcaattccttcacttcttcaggaatcacatacacacccat

SEQ ID NO: 7987 - DNA, 105 bp, homo sapiens
ctgggggtcccacctgaggacctcgttccagcaccaccccggaggaccccaaagctgcccctgaggcctgctccgcacaccctggggctcccacctgaggacctc

SEQ ID NO: 7988 - DNA, 89 bp, homo sapiens
gttttgccatgttggccaggctgctttcaaactcctaatttttgtatttttagtagagacggggttttgccacgttggccaggctgctt

SEQ ID NO: 7989 - DNA, 86 bp, homo sapiens
catgcaaaaaatctgttaatcaactgtttaataaggcttctgtatataatacatataacatgcaaaatatctgttaatcaactgtt

SEQ ID NO: 7990 - DNA, 78 bp, homo sapiens
taacagtttcttaatgtataaaggttacacacttttatcaagacaaagcaaagttaacagcttcttaatgtataaagg

SEQ ID NO: 7991 - DNA, 113 bp, homo sapiens
taaaaatacaaaaaaattagccgggcggatcacgaggtcaggagatcgagaccatcctggctaacacggtgaaaccccgtctctaataaaaatacaaaaaaattagccgggcg

SEQ ID NO: 7992 - DNA, 110 bp, homo sapiens
actgcactccagcctgggcaacagagccagactccgactcaaaaaaaaaaaaaaaaaaagagtgcagtgagccaggattgcgctactgcactccagcctgggtaacagag

SEQ ID NO: 7993 - DNA, 81 bp, homo sapiens
aattcagtttccagactagcttacaaaagttctgtactcaccaattgtactatttacaattcagtttccagactagcttct

SEQ ID NO: 7994 - DNA, 247 bp, homo sapiens
gtcttcctcccttccttccttccttccttccttccctccttccctgcttccctccctctttttcttccttcctttctttcttttctttcttttctttcctttctttctttctttctttctttctttctttctttctttctttctttctttctttctttcttctttctttctttctttctttctttctttctctctctctctttctttctttctctctctctctctcttcctttcttccttttcttct

SEQ ID NO: 7995 - DNA, 107 bp, homo sapiens
aagacatgatcagattacatttttcatctctagttatcctgcctgtgtattgaaaagtggcctcttttcaaaatggtctctccaagacatgaccagattacattttt

SEQ ID NO: 7996 - DNA, 158 bp, homo sapiens
attttaaaggataggagtaggaggaccaattttgagcagaagaaaggaattaggaataagtaggtaacattggtaatgataatttagtaaacagattgtccatgaacacattttaaaggataggagtaggaggaccaattttgagcagaagaaaggaa

SEQ ID NO: 7997 - DNA, 111 bp, homo sapiens
aaatgcaccaatcagcactctgtgctagctaaaggattgtaaatgcaccaatcagcactctgtaaaatggaccaatcagcactctgtaaagtggaccaatcagcaggaagt

SEQ ID NO: 7998 - DNA, 94 bp, homo sapiens
gccttaaatatgtatttctgctctaaatactcaatggtgcctgggtttttttattttttatttttttgccttaaacatgtatttctgctctaaa

SEQ ID NO: 7999 - DNA, 75 bp, homo sapiens
ataatatatctatctataatacacatggatatattacttgaaaatgatatataatatatccatctataatacaca

SEQ ID NO: 8000 - DNA, 97 bp, homo sapiens
ctgcattaacccctttatcattatataatgaccttatatgttcagattgttatattacccttctgcattaacctctttatcattatataatgacctt

SEQ ID NO: 8001 - DNA, 94 bp, homo sapiens
cattatagttatataatattgtctcatttatctttgtttaatgttatttatataccaggcaatgcattatagttatataatattgtctcattta

SEQ ID NO: 8002 - DNA, 96 bp, homo sapiens
ttttgagaaacctccatactgttctccacacagttttcatactgtgtgagccactgcacccagtgtattaattttttgagaaacctccctactgtt

SEQ ID NO: 8003 - DNA, 128 bp, homo sapiens
cttctcaatcccatatcatcattacacttgcaaaggtctctcactgcattataactaaatatatcttctctctggacaataatctcttctcaatcccatatcatcattacactgcaaaggtctctcat

SEQ ID NO: 8004 - DNA, 110 bp, homo sapiens
aaaggatgcctgtgatcaaaatttttctttgcaaaccagactagctgaatttctaccctgctctgactccacttatcttgaagagaaaggatgcctgtgatcaaaagttt

SEQ ID NO: 8005 - DNA, 97 bp, homo sapiens
aggaaagcgggacttgccactaagggtgaaggagaaggggttgaggggtacttgcccctgccccaggaaagcgggacttgccgctaagggtgaagga

SEQ ID NO: 8006 - DNA, 97 bp, homo sapiens
gttcacgtccatttgctatatgaatgaatgagctcttataagctgtgcattaagaacaggcagttcacgtccatttgctatatgaacgaatgagctc

SEQ ID NO: 8007 - DNA, 95 bp, homo sapiens
ccccaagtgccttgaaagtggggtgcaatccaaaattcgaatagtccattaatatagtcttagaccccaagtgccttgaaagtggggtgcaatcc

SEQ ID NO: 8008 - DNA, 90 bp, homo sapiens
ggtcccatttgtggctgagtggctgcgcaggggtgacccttttcccctctctttccaggtgccttggtcccatttgtggctgagtggctg

SEQ ID NO: 8009 - DNA, 96 bp, homo sapiens
tgagtcctggaaatcaaggttgcagtgagctgtgttcataccacagagcaagatgctatctcaaaatgagtcctggaaatcaaggctgcagtgagc

SEQ ID NO: 8010 - DNA, 97 bp, homo sapiens
cagcctgggcgacagagcaagactccatctcaaaaaaaaaagactgcagtaagccgtgagcatgccactacactcagtctgggcgacagagcaagac

SEQ ID NO: 8011 - DNA, 78 bp, homo sapiens
acctcccaattccagtgacttttttactggcaaacctcccctaatttactggcaaacctcccaattccagtgactttt

SEQ ID NO: 8012 - DNA, 101 bp, homo sapiens
gctgggattacaggcgtgagccaccgcgcccggccgatctcctgacctcatgatctgctcacctcggcctcccaaagtgctgggattacaggtgtgagcca

SEQ ID NO: 8013 - DNA, 94 bp, homo sapiens
tcagccctcagcagagaggaaactctagaatgggtagctcctctccacaggcaggttgtcctgttgtcttctcagccctcagcagagaggagac

SEQ ID NO: 8014 - DNA, 74 bp, homo sapiens
tgattcacctttctaaaggaaacgccaaactcagcatctccagtgggacttgattcatctttctaaaggaaacg

SEQ ID NO: 8015 - DNA, 71 bp, homo sapiens
gaggcaggaggatcacttgatccaggagttcgagaccagcctggctgagaggcaggaggatcacttgagcc

SEQ ID NO: 8016 - DNA, 79 bp, homo sapiens
ggcctcttaaagtgctgggattacaggtgtgagccaccgtgcctggcccccacctcggcctcttaaggtgctgggatta

SEQ ID NO: 8017 - DNA, 802 bp, homo sapiens
cttctcatacttgctacactcatagggtttctctccagtatggattctttgatgctgatgaagatttcttttgctagtcaaggcttttccacactcatcacatacataggaagactcctgagtatgaattctcagatgcctttttaattgttcctgagcactgaaggcttttccacaatctacacagtcaaagggtttctcctcactgtgaattctctggtgccgagttagttttgtatgaaaattgaaggcttgtccacatactttacaagaataaggcttttcccctgtgtgaatacgctgatgttggcttagatgggaagtccttccaaagcttttgccacactcattacactcatagggtttctctccagtgtggattttctgatgccgaagtaggggtgaattaccaacaaaagctttgccacactcattacactcatagggtttctccccagtgtggattctctgatgtataacaaactcggaactactcgtgaaactattcccacactctgtacagtaatagggtctgtccccactgtggattctctgatgcctgatcagatttgcattatcattaaaggctcgcccacactcctcacactgatagggtctctctccagtgtgaatcctctggtgccgaattaacgaagaattaccattaaaggcttttccacactcactacactcaaaaggtttctccccagtgtggattctctggtgtctagcatagtaagaaaagtagctgaaggatttcccacactcctcacatatgaaaggtttccttgcacaggggatt

SEQ ID NO: 8018 - DNA, 125 bp, homo sapiens
aatcttggctcactgcagcctctgccacccaggttcaaacgattttcctgtctcagtctccctagaattataggcacactccaccagaatcttggctcactgcagcctctgcctcccaggttcaa

SEQ ID NO: 8019 - DNA, 82 bp, homo sapiens
acttgccccttccccagaaaagcagagaaggggtagagagggagagaaggagttggggaacttgcccctcccccagaaaagc

SEQ ID NO: 8020 - DNA, 107 bp, homo sapiens
gttacctgaacacgatctcatatttccccacattcctccccacggcggacttgatggccttacatctgatgggattccagttacctgaacgcgatctcatatttccc

SEQ ID NO: 8021 - DNA, 102 bp, homo sapiens
tttttaattaaagaaagaaggaaatatgtatatatgttggaatatatatatatagcaacatatatgttacttttttaattaaagaaagaaggaaatatatat

SEQ ID NO: 8022 - DNA, 125 bp, homo sapiens
gcctgtaatcccagcattttgggaggccaaggcgggcggatcatgaagtcaagagatcaagacaatcctggccgctgggcacggtggctcacgcctgtaatcccagcactttgggaggccaaggc

SEQ ID NO: 8023 - DNA, 82 bp, homo sapiens
cctctccatttacataggacatacactgagtaaatgactttctaactttacttcatcctcttcatttacataggacatacac

SEQ ID NO: 8024 - DNA, 92 bp, homo sapiens
attagctagttctttcaggctttttgttggctatcagttctttctattagctattctaatggctattagctagttctttcaggttttttgtt

SEQ ID NO: 8025 - DNA, 100 bp, homo sapiens
gtatgtagttgctcatagtagccactaatgattcattatccatttcttctaaattttccaatttatttgtatatagttgctcatagtagccactaatgat

SEQ ID NO: 8026 - DNA, 102 bp, homo sapiens
agtctaacaggacactctcctcccccaaaaattaaataaataaataaaataaaaatttaaaaataaccaccacctaagagtctaacaggagactctcctccc

SEQ ID NO: 8027 - DNA, 121 bp, homo sapiens
ctactctgagttgttggtgttgagcaagagttttcccaaaaggactttctccatgttcctgctcctcctccccatagcagcaaactctactctgagttgttggtgttgggcaagagttttc

SEQ ID NO: 8028 - DNA, 122 bp, homo sapiens
ctctacttgtggatatgtttgaaattatccaactcaggaacacagatgatgggttcatggggtctgctggttcatgctctacttgtggatatgtttgaaattatccaactcaggaacacaga

SEQ ID NO: 8029 - DNA, 79 bp, homo sapiens
ttctatctccccaagttcaccttttccagttggtcaaagcgattgctgggcgccttctatctccccaagtccacctttt

SEQ ID NO: 8030 - DNA, 125 bp, homo sapiens
gagattttgattaaatatatccaactggtgttgaataaaagctaaatattttaacgtaaagtttttttgagcactctattctttcgagattttgattaaatatatccaactggtgttgaataaaa

SEQ ID NO: 8031 - DNA, 78 bp, homo sapiens
ctcttcagtctagctaaagatttttgtaatttgagttctctgtctccttccctctctcttcagcctagctaaagattt

SEQ ID NO: 8032 - DNA, 88 bp, homo sapiens
aagaaaaaagttcaggtaatgtctcggagcaagactccatctccaaaaaaaaaggaaaaagggaagaaaaaagttcaggtaatgttct

SEQ ID NO: 8033 - DNA, 116 bp, homo sapiens
tttttatgggtgaatcgtacttcatagtgtatatgtaccttccattcatgttgttgcagattactggatctcactcgtttttatgggtgaatcgtacttcatagtgtatatgtacc

SEQ ID NO: 8034 - DNA, 98 bp, homo sapiens
tactaaaaatacaaaatttagccaagtgtggtggctaaccccatctgtactaaaccccatctgtactaaaaatacaaaaattagccaagtgtggtggc

SEQ ID NO: 8035 - DNA, 107 bp, homo sapiens
atagacatcatcttcaccaaatgatcaaacttggtagtaaagagaggatgcagatacccttacagtagagttttcatagacaccatcttcaccaaatgatcaaactt

SEQ ID NO: 8036 - DNA, 80 bp, homo sapiens
tttggccctctctcaccctctcttgactgtgacaatgggtttgttataaaagtgaatttggccctctctcgccctctctt

SEQ ID NO: 8037 - DNA, 77 bp, homo sapiens
gtatataggtatatgtgtatgtagatatctaaactactagactcgtgctcatttgtatatacgtatatgtgtatgta

SEQ ID NO: 8038 - DNA, 102 bp, homo sapiens
tccttattgatctagttttgcaaatgaggaagccaagaatgggggaggttaagtgtaggaggtatagcttgaaactctccttattgatctggttttgcaaat

SEQ ID NO: 8039 - DNA, 101 bp, homo sapiens
taatatttcatttagttaggaaacatcaactaaatcccatcacatcaactaaacatcatttagttgggaaactaatatttcatttagttgggaaacatcaa

SEQ ID NO: 8040 - DNA, 100 bp, homo sapiens
tttttttgcttccttcgtacttcatttgtgtattttgtgtatttgacatattgctgctaacttttcagctatttttttgcctccttcgtacttcatttgt

SEQ ID NO: 8041 - DNA, 81 bp, homo sapiens
gattgctggatcaaatggtggttctacttttagttctacttttactgggtagtgagattgctggatcaaatggtggttcta

SEQ ID NO: 8042 - DNA, 89 bp, homo sapiens
tataaatcagtagatcaaaagaaaaaggtcattcctcttcccatttttcaagtacaaccaaatctctataaatcagtagatcaaaagaa

SEQ ID NO: 8043 - DNA, 62 bp, homo sapiens
agtacattctatgtccttgtactttaaccaaagtacattctatgtccttgtactttaaccaa

SEQ ID NO: 8044 - DNA, 102 bp, homo sapiens
aagacagaagccctgaatagatggaacacatgtctgttcttcttctcctaaactcctcctgagcgtcccactcttaagacagaagccctggatagatggaac

SEQ ID NO: 8045 - DNA, 97 bp, homo sapiens
ctctgtagctagctagagatttgtaaaatgcaacaatcagtgctctgtaaaaacgcaccaatcagcactctgtagctagctagaggtttgtaaaatg

SEQ ID NO: 8046 - DNA, 78 bp, homo sapiens
agtgctccgtaaacatcagtctctattatcaacagtctctattatcaatcagtctctattatcatcagtctctattat

SEQ ID NO: 8047 - DNA, 138 bp, homo sapiens
tctagatctccctgctaacttacactgtgctcaaaacacacacacacacacacacacacacacacacacacacactggctgtcctcactgtcaactctagatctccctgctaacttacactgtgctcaaaaaacacac

SEQ ID NO: 8048 - DNA, 122 bp, homo sapiens
tttgatgtctaggtctggatttcaagggctcagaaactctctcatgcatgtagttccctcctgctttgaatctctctgactttccttgattttgatgtctaggtctggatttcaagggctca

SEQ ID NO: 8049 - DNA, 104 bp, homo sapiens
aagtggatttttagaaatagaaaaaactaatttagaaatagaaaattaattgagttttagtttttagaaaattatctaagaagtagatttttagaaatagaaaa

SEQ ID NO: 8050 - DNA, 192 bp, homo sapiens
gaaagcaaccaatcagaggctgaagtgaagttacaaatatcacactcctatgcaaacatctgattggttttggaaagcaaccaatcagaggctaaagtgaaattacagagttgctcttttatgcaaacgaagactccgcctccagtcagtatgattggttgtgggcagcaacccatcagaggctgaagtgaa

SEQ ID NO: 8051 - DNA, 116 bp, homo sapiens
ccaccaccaccttacaatcattaaaaccacttcttagggaagtcccatcaccttacaatcattaaggtgatgatacaatcattaaggggggggtcccatcaccttacaatcataaa

SEQ ID NO: 8052 - DNA, 97 bp, homo sapiens
tgttctaatatatgttgttctatatatagatatatgttgttctaatatatgctgttctaatatatgttgttctatgctgtaatatgtgttgttctaa

SEQ ID NO: 8053 - DNA, 356 bp, homo sapiens
tgcggggtcggtgcaacacaaacacaagctgcagctctcagggggttggcacaaggcaacacaacctgcagcctgaggggaggaggggtcggcggaacgcaaacacaagctgtagcccttgcggggggcgggcgggctgccggcgcaaaagcaaacacaagctgcagccctcgcgggggggtcagcgtaatgcaaacacaagctgcagccctcgggggggggtcagcgtaatgcaaacacaagctgcagccctcgggggggggtcagcgcaatgcaaacacaagctgcagcccttgagggggtcggtggcggggaggggggtgagctggcacaacccaaacacaagctgcagccct

SEQ ID NO: 8054 - DNA, 312 bp, homo sapiens
ctcccagccctgagcaatgtccccacaacaggtgcctcccagccctgagcaatgtgcctccccacacacaggcgcctcccagccctgagcaatgtgcctccccacacacaggcgcctcccagccctgagcaatgtgccccccccgacacacaggtgcctcccagccctgagcaatatgcgctgcaggtgctttccagcagagcaatgtccctcctacaagtgtctcccagccctgagcaatgtcccagacaggtgactcccagccatgagcaatgtcccagacaggtgactcccagccatgagcaatgcctt

SEQ ID NO: 8055 - DNA, 95 bp, homo sapiens
gagggacagtgcagagagtggcccatgtgttgtggcccaggcagtgggaacaaggtggggggacaggttagagggacagtgcagagagcggccca

SEQ ID NO: 8056 - DNA, 120 bp, homo sapiens
ttcccaagtttttcattttaaaccaaaagtgcttccctgtaaactccttgagaggtagcctgtctaactgttggacaattctactcgttccaaagtttttcattttaaaccaaaagtgct

SEQ ID NO: 8057 - DNA, 123 bp, homo sapiens
tcatcatgacccctaccattactgtcatctccgctgtcaccatcactgtcaccatcaccgtcaccgtcaccatcactgtcaccatcaccatcaccatcaccatcaccatcactgtcaccgtca

SEQ ID NO: 8058 - DNA, 79 bp, homo sapiens
gcatgtgcaaaggccatggggcagcggctaaaggaggtaaaggagccatccacagcatgtgcaaaggccctggggcagc

SEQ ID NO: 8059 - DNA, 111 bp, homo sapiens
cctctcggccgttagagatagtgctgcggtgaatgcaggccgtgcttctccatccctccatcagcagacacgaggctgcttccgcctctcggccgttacagatagtgctgc

SEQ ID NO: 8060 - DNA, 89 bp, homo sapiens
gtctgaatggattctcctctgagtgaccctcagggttgggctgggggacctttcccaggtctgaatggattctcctcagagtgaccctc

SEQ ID NO: 8061 - DNA, 88 bp, homo sapiens
ctgtgcgttccgccgtggcgggaacccttttagggtcacgtcttcccccacgtcccctgtctgtgcgttccgccgtggtgggaaccct

SEQ ID NO: 8062 - DNA, 92 bp, homo sapiens
ccttccccttctgtttctccttctcctttccctcttctccctcacttcccctacccctgcttctctccttctgtttctccttctcctctccc

SEQ ID NO: 8063 - DNA, 81 bp, homo sapiens
acagtgtgctaggacctatgtagatgagcttagattctcagatatttatttggctttaacagtgtgctaggatctatgtag

SEQ ID NO: 8064 - DNA, 100 bp, homo sapiens
atgataattctatgttcaactctttgagaaaccacccaactgtcccctaggagtggaattgctggctcatatgataattctatattcaactctttgagaa

SEQ ID NO: 8065 - DNA, 107 bp, homo sapiens
gatcaaacaccagggatgttccgcagcctgaatgcagacagcttcagtacaatcttgttagtgggtagatgatcaaacaccagggatgttccgcagcctgaatgcag

SEQ ID NO: 8066 - DNA, 115 bp, homo sapiens
agaactaataggaaatatatatatatatatatatatatatatatgcacatatatatatatacacacacacacacacacacacacacatatatatatatatatatatatatataca

SEQ ID NO: 8067 - DNA, 107 bp, homo sapiens
agagttctttttgcacattgaattctttatgcacatgttattttgtgtattttttatgtatgttttttgtgtattttttagatagagttctttatgcacattgaatt

SEQ ID NO: 8068 - DNA, 99 bp, homo sapiens
ttaattgatgtaaaattcacataacataaaattaaccacgttaaagtgaacaattcagtggcgtttagtacgttaattgatgtaaaattcacataacat

SEQ ID NO: 8069 - DNA, 116 bp, homo sapiens
ctcacagctgcacacctgcaccgctcacaaacacagctgaccgtctcacagctgcacacctgcaccgctcacgagcacagctgaccgtctcacagctgcacacctgcactgctcac

SEQ ID NO: 8070 - DNA, 86 bp, homo sapiens
tttacacggggagctggggacaaagtggatgacatctcaccacagttcggtgagagcatttacacagggagctggggacaaagtgg

SEQ ID NO: 8071 - DNA, 80 bp, homo sapiens
ggcccagctcgactccttcaccccgacctttccatggtcctctctccccacgcgcacggcccagctcaactccttcaccc

SEQ ID NO: 8072 - DNA, 101 bp, homo sapiens
gcctggtgtgcctggaacatgcgtagtaaggagaggaagcctggtgtgcctggatcatgcgtagtaaggagaggaagcctggtgtgcctggaacatgcata

SEQ ID NO: 8073 - DNA, 81 bp, homo sapiens
ctgcagcctcaactgcagtgagctgtgactgcaccgttgtactcctgggctcactgcagcctcaactgcagtgagttgtga

SEQ ID NO: 8074 - DNA, 84 bp, homo sapiens
tgtgcataggcctgggtgtgggtaccttccgtgtgtctcatggtgtggagagagaacagtgtgtgcataggcctgggggtgggt

SEQ ID NO: 8075 - DNA, 97 bp, homo sapiens
gagggaatctggcggcaggagggggctgagcctgtcactatctccatgcgatcacccggcctggctcttgagggaatctggtggcaggagggggctg

SEQ ID NO: 8076 - DNA, 93 bp, homo sapiens
cctccacactcacttggtttgttggccaggacgcagtctcacctggggactcgaccggggaagaacccacctccacactcacttgggttgttg

SEQ ID NO: 8077 - DNA, 78 bp, homo sapiens
tgtacagttttttgctttaaaattatatgattattatataattatattattatgtaaagttttttgctttaaaattat

SEQ ID NO: 8078 - DNA, 100 bp, homo sapiens
agaggtgcccagaggtgcccagatgacctccagtgtttctgtccagagtccatgagcccatccccacatgtgtagaggtgcccaggtgacctccagtgtt

SEQ ID NO: 8079 - DNA, 80 bp, homo sapiens
ttagggacacagggacaagagcctctgtctcaggagcctccccatgccttggcttagagacacagggacaagagcctctg

SEQ ID NO: 8080 - DNA, 95 bp, homo sapiens
ggagacacagccccatgaagcaactgaggggtgttcataattgctcagcttggaccattctgcattaggagacacagccccatggagcaactgag

SEQ ID NO: 8081 - DNA, 65 bp, homo sapiens
aggagccatctcactggctgggtgaacagcatttggggccaggagccatctcattggctgggtga

SEQ ID NO: 8082 - DNA, 109 bp, homo sapiens
catcaccacctatggtgaaaccatcaacatctgtgccataaacgtatgaaaccaccaccttttatgccataaatatgtgaaatcattaccacctatggtgaaaccatca

SEQ ID NO: 8083 - DNA, 96 bp, homo sapiens
tgttaaagtgcaggttctgatcccatgggtctgggtgggtctgagatcatgaatctccagatcttgttaaagtgcagattctgatcccatgggtct

SEQ ID NO: 8084 - DNA, 95 bp, homo sapiens
tggagtaaaaagtgagaggtgacctaccggggaggtagagaggtgtttccaccaggataagaggggaagagtggagtaaaaagtgagaggtgacc

SEQ ID NO: 8085 - DNA, 89 bp, homo sapiens
acactcccttatctagggggaggagcctattgaaggttcattacaccacaggaatttacagacactcccttatctaaggggaggagcct

SEQ ID NO: 8086 - DNA, 78 bp, homo sapiens
aggaagttccaaactttcccacatcctcctgtcttctgagctctccaagtctccaggaagttctaaactttcccacat

SEQ ID NO: 8087 - DNA, 89 bp, homo sapiens
gggtgcaagagggagcctcctggccagtccccgagcttgcctggaccatgacctgagagcaggagggggtgcaagagggagcttcctgg

SEQ ID NO: 8088 - DNA, 90 bp, homo sapiens
agtacaggccacctagcttagcctgcagccacatcccctgatgagaccccacctcccgcagaagtacaggccacttagcttagcctgcag

SEQ ID NO: 8089 - DNA, 99 bp, homo sapiens
cccaggtggggagtgaccagaggacacccaggcagagccactgctcccttggggactcctgggccccctgctcttcccaggtggggagtgaacagagga

SEQ ID NO: 8090 - DNA, 109 bp, homo sapiens
tgaacattgtaacatttgtttttgttagtttttgaaaattgctcagaaagaactctaccactccttatagccattgaacattgtgaacattgtaacattggtttttgtt

SEQ ID NO: 8091 - DNA, 101 bp, homo sapiens
ggcctgtttgttagaacctctcggctttcccttcccggggcctgtttgttagaacctctcggctttcccttcccggggcctgtttgttagaacctctcggc

SEQ ID NO: 8092 - DNA, 99 bp, homo sapiens
atagcacacggggactgagaagcataggcgtcctgtctcacaccccttgtggtccataggcaaagcagcgggaacatagcacatggggactgagaagca

SEQ ID NO: 8093 - DNA, 151 bp, homo sapiens
ccaggttttccagaaaggggcaagcccaccccggccatcctcactgaggacctcccccgcccccaggaggaacacaccaccccttcagcagtgggggctggcccaggttttccagaaaggggcaggcccaccccggccatcctcactgagg

SEQ ID NO: 8094 - DNA, 80 bp, homo sapiens
ctgagcagagtgggttcaggagcaggtggagaaacaggcccagggaggcgggcgactgagcagagtgggttcaggaggca

SEQ ID NO: 8095 - DNA, 93 bp, homo sapiens
ctgtctcctcccctcacctgcacaggcatcaccccgagcccacctgtctccccaccagcccacctgtctcctcccctcacctgcataggcatc

SEQ ID NO: 8096 - DNA, 128 bp, homo sapiens
gggccaagctgtgcaccgaggagggcgtacatgggggctctgtggcacccccacagagcagcgcaggggaagaggcggttcagggccaagctgtgcaccgaggagggcgtacatgggggctctgtggc

SEQ ID NO: 8097 - DNA, 101 bp, homo sapiens
ctgtgattgttttctggtatgtgggggatgtgccagaaccagggctgagctgtgaccacgagggccatcccggagctgtgattgttttctggtgtgtgggg

SEQ ID NO: 8098 - DNA, 89 bp, homo sapiens
gcagctgaacacacgtaccatctgtgcacacaaaggcacatgttgatggggctgtaggcagctgaacacacgtagcatctgtgcacaca

SEQ ID NO: 8099 - DNA, 96 bp, homo sapiens
agcttcgagagcccaaagctcccagggaagctttgagcttcctcaaaaagctattttgagcctaaaatagcttcaagagcccaaagctcccaggga

SEQ ID NO: 8100 - DNA, 95 bp, homo sapiens
cttgtcgtggcctctgccaggcccgctgtcatccggcctgtcgtggcctctgcccggcctgctgtcatccggcttgtcgtggcctctgcccggcc

SEQ ID NO: 8101 - DNA, 100 bp, homo sapiens
ccccactctctaccctcccaggccagcgcactgcctcctgggccagcacccccacctgcccccaccgccggcgccccgctctctaccctcccaggccagc

SEQ ID NO: 8102 - DNA, 90 bp, homo sapiens
tagtctcagaccccaggaaaccgccgtcagtgctggtggcccctgccctgggccggctcccgcgttagtctcagaccccaggaaacctcc

SEQ ID NO: 8103 - DNA, 125 bp, homo sapiens
tatgtgcatgtgtgtgtgctgtgcatgcccatgtatgtgtatgtggtgtgtgcatgcatgtggcatgtaaggctgtgtgtgcgtgtgtatatgttgtgtgcatgtgtgcatgcatgtggtatgta

SEQ ID NO: 8104 - DNA, 89 bp, homo sapiens
cccatcacagaactgggcagcggcctccccccaggcagcgcaaagggggttgtcaccacccatcacagaactgggcagcagcctccccc

SEQ ID NO: 8105 - DNA, 98 bp, homo sapiens
gtttacctcacaccacatacaaaacatgaacctctacgcttacctcacaccatatacaaaacatgaacctctatgcttacctcacaccacatacaaaa

SEQ ID NO: 8106 - DNA, 101 bp, homo sapiens
gactcccccctgcaccccctcaggatgactagatggatatgagaggtggtctcgggtgtggagggcgatgcggactccctcctgcaccccctcaggatgac

SEQ ID NO: 8107 - DNA, 84 bp, homo sapiens
gggaagggctttccaaggctgaaaacctcttcaggggttggtgggtggggcgaggtgggaagggctttccaaggctgaagacct

SEQ ID NO: 8108 - DNA, 98 bp, homo sapiens
ctcggaccagcaacgcagcagacgtcgagcccctaccctcggaccagcaacgcagcagacgtccagcccctgccctcggaccagcaacgcagcagacg

SEQ ID NO: 8109 - DNA, 87 bp, homo sapiens
aatcagagggtcctcatgatcccatccatgcacccacatcccggctgtcgtccacaatcctacgaatcagagggtcctcgtgatccc

SEQ ID NO: 8110 - DNA, 107 bp, homo sapiens
acaaatgagtaagcagcagttaggaagtgtgccaagtcctgacgtgcagagttcagagggctgaggaggggtgacacggaagcacaaatgagcaagcagcagttagg

SEQ ID NO: 8111 - DNA, 88 bp, homo sapiens
ttggggcaggcccattctcatgtcttcgtaggccgatgatgtacagaacagaagatggagggttggggcaggcccattctcgtgtctt

SEQ ID NO: 8112 - DNA, 91 bp, homo sapiens
cctgtagtcctggcacctcgaggggctgacatgtgttccctctgcaggcctggtacagtgggtcacgcctgtagtcctggcacctcggggc

SEQ ID NO: 8113 - DNA, 103 bp, homo sapiens
gtatcctgaaaccgcatgtccctgacacatagctgcccagggggagcatgtgtccagtcccaggaagtctgtatcctgaaaccacatgtccctgacacatagc

SEQ ID NO: 8114 - DNA, 96 bp, homo sapiens
tgaggatgagtcagtgttaattttctcagacctgggctccgtcactcctgagacagtcagattgggtatttgaggatgagtccgtgttaattttct

SEQ ID NO: 8115 - DNA, 95 bp, homo sapiens
ggggccaccggcattacctggcggggattggctggatcctgggaagagcctttcctgcggggcggggccacctgcattacctggcggggattggc

SEQ ID NO: 8116 - DNA, 100 bp, homo sapiens
caggcctggccgagagaacagtaatatttatttatttatttatggagtctcgctctgtcgccaccaggcctggccgagagaacagtattatttatttatt

SEQ ID NO: 8117 - DNA, 124 bp, homo sapiens
ggacgtggcatgatgcaggggaaggaacggtcacctacgtgctgctgttcttgcccgaggagcacacacaaaccctagactcaggacgtggcatgatgcaggagaaggaacggtcacctacgtg

SEQ ID NO: 8118 - DNA, 99 bp, homo sapiens
ctctaaggagcccctgtccagatgagcaggaaacgtggcaggtcccgcatggtataaaaagggacggttcttgcgctctaagaagcccctgtccagatg

SEQ ID NO: 8119 - DNA, 117 bp, homo sapiens
tacagcaaaccaggtgagggtctgcagatgctgctggggatggagggttggggggcgttgtctgtgcactggccccggtacagcaaaccaggtgagggtctgcagaggctgctgggg

SEQ ID NO: 8120 - DNA, 102 bp, homo sapiens
ggacagctccccttgcagccccggacggcccccgcgcagccccagacagcccccgggcggccctcacgcagccgccggacagctccccttgcaaccccggac

SEQ ID NO: 8121 - DNA, 75 bp, homo sapiens
gagccaggaggtgaaggtgggggtgggggtgggcctggcctgttggggagaggagccaggaggtgaaggtggggg

SEQ ID NO: 8122 - DNA, 109 bp, homo sapiens
ggtgaagcactgctcagggtttagtaaccagcaagcctccgcctgtccttcactgggcctggtctgtcgggttgctgaaggctggtgaagcactgctcagggtttagta

SEQ ID NO: 8123 - DNA, 86 bp, homo sapiens
gggctggtctgaggatgaggcccgtggtttagtgttgaatatgatactcattgctttagctgtgggctggtctgagggtgaggccc

SEQ ID NO: 8124 - DNA, 113 bp, homo sapiens
tgaggaggactgacttccggctaaagccccgctcacactctctgcagacataaggcttctcccctgtgtgtgtcctctggtgactgaggaggtctgacttccggctaaagccc

SEQ ID NO: 8125 - DNA, 213 bp, homo sapiens
caaagaaagaaaagaaagaaagaaagaaagaaagaaagaaagaaagaaagaaagaaagaaggaaggaaggaaggaaggaaggaaggaaggaaggaaggaaggaaggaaggaaaggaaaggaagaaagaaagaaagaaagagaaagaaagaaagaaagaaagaaagaaagaaagaaagaaagaaagagaaagaaagaaagaaacaaacaaacaa

SEQ ID NO: 8126 - DNA, 125 bp, homo sapiens; identical to SEQ ID NO: 6

SEQ ID NO: 8127 - DNA, 81 bp, homo sapiens; identical to SEQ ID NO: 4

SEQ ID NO: 8128 - DNA, 96 bp, homo sapiens
ctggggcacacagaccagggctccccacgagggcctctgaggcacacagaccagggctccacacaagggccctctgaggtacgcagaccaggctga

SEQ ID NO: 8129 - DNA, 87 bp, homo sapiens
cagccctccccaccgtcaccctgaccgtccacccatccccatctgagggcatatccagcccactcagccctccccaccgtcaccctg

SEQ ID NO: 8130 - DNA, 89 bp, homo sapiens
agatttggcagtgatttcttagaggacaccaaaaaataggtgtcatctacattttggtgtcatctaagatttggcaatgatttcttaga

SEQ ID NO: 8131 - DNA, 155 bp, homo sapiens
catttggtgactgactagcattgtgaggttgagcaattcacttacatcattgtaaagtctaccgctctcttgcaggatatgtggaactaggaacatgggttccaacccatttggtgactgactagcattgtgaggttgagcgattcacttacatc

SEQ ID NO: 8132 - DNA, 98 bp, homo sapiens
cttgctctgtcacccaggctggagcacagcagttttattttattttatcattttattttattttgagatggagccttgccctgtcacccaggctggag

SEQ ID NO: 8133 - DNA, 97 bp, homo sapiens
tgtaacacccacagtgaaactaaagggcgggggacaccctcaaccactccccccaccttctatcaatgtaacaccaacagtgaaactaaagggcggg

SEQ ID NO: 8134 - DNA, 112 bp, homo sapiens
ttgataatcaagtgtgggcacggccatggcactgaaattcacaaatgtacaccgtaatacacccatcagagtcagaagtaaacaggttgataatctagtgtgggcacggcca

SEQ ID NO: 8135 - DNA, 97 bp, homo sapiens
caacctgtgatcctagagctatttaaacaaacaaacaacctgcgatctgagagctattcaaacaaataaactaacaacctgtgatcctagggctatt

SEQ ID NO: 8136 - DNA, 82 bp, homo sapiens
tgcgtgtcaggcgtgagctacacagttacgtgctgccatgaggatgggatgatgcgtgcgtgtcaggcgtgagctacacagt

SEQ ID NO: 8137 - DNA, 108 bp, homo sapiens
attcttggtgactctggaactgaggtggcagaaaggagagcctctggcccaaactattccctactctgaattcttggtgactctggaactgaggtggcagaaaggaga

SEQ ID NO: 8138 - DNA, 106 bp, homo sapiens
ggtgctcaacagcagcagaggctgcgggactctcacacacccagcctcagcaatgccaacaacgcagcccactccccatgatggtgctcaacagcagcagaggctg

SEQ ID NO: 8139 - DNA, 101 bp, homo sapiens
tgttccgtgtcttgtctgtgatgatggtggttacgtggtacgtacatcagtcagctgaactgtgtacctttgttccgtgccttgtctgtgatgatggtggt

SEQ ID NO: 8140 - DNA, 101 bp, homo sapiens
gaagacagagcagaaagcccagcgcctgcacgtgccacacttgccttctcaggaggattaagtgagaagacagagcagaaagcccagcacctgcacgtgcc

SEQ ID NO: 8141 - DNA, 98 bp, homo sapiens
gatggtttgcaggaggagcagaaggaggcgggctcagtgggagatggcccacgtaaccagtcagacagcgatggtttgcgggaggagcagaaggaggc

SEQ ID NO: 8142 - DNA, 110 bp, homo sapiens
ccaatacttttcagatcagatctgaggattataattcatacccctaggctgggcacggtggctcatgcctgtaatcccaatacttttcagatcaaatctgaggattataa

SEQ ID NO: 8143 - DNA, 95 bp, homo sapiens
ttgcacatcagcttggggttccagtcccaccctcccgggtagagagaaggaggctcaaaggagtttgcacgtcagcttggggttccagtcccacc

SEQ ID NO: 8144 - DNA, 155 bp, homo sapiens
agctggggaagggggggaacctgccccgggaggagagagctggggaaggggggaacctgccccgggtggagagagctgggggaagtgggggaacctgccccgggaggagagagctggggaaggggggaaacctgccccaggagagagctggggaa

SEQ ID NO: 8145 - DNA, 124 bp, homo sapiens
cccccggagtgtccgcacccaccctccccagcgcggtccccacctccgctctcccagagcccacgcagatggcctcagcccccgcccccggagtgtccgcacccaccctccccagcgtggtccc

SEQ ID NO: 8146 - DNA, 90 bp, homo sapiens
atagcacacactgccacgctgaccccacaactcccagaggggtctctctcctaaaacttcaccttcaatagcacacactgccacgccgac

SEQ ID NO: 8147 - DNA, 90 bp, homo sapiens
ctcagcctcccaaagtgctgggattaccagtgtgagccaccgcacccagtcctctcagccctctcaacctcccaaagtgctgggattacc

SEQ ID NO: 8148 - DNA, 80 bp, homo sapiens
ggggttgcgcccccacatcccagcctggggcagagagaaggagctccggggcctggggctgcgcccccacatcccagcct

SEQ ID NO: 8149 - DNA, 97 bp, homo sapiens
gtgtggaggaaggagaggaagggatgatggcccagcctgtgtcgtgacgatgccagctgagcacaagtgtggaggaaggggaggaagggatgatggc

SEQ ID NO: 8150 - DNA, 82 bp, homo sapiens
tgagccagagtccttctgcaccgccctcccgaaggtccaaactgatgcaaaggtgctactgagccagagtccttctgcaccg

SEQ ID NO: 8151 - DNA, 88 bp, homo sapiens
ggagggaggtatcggcagggtggccggggctgtgaggggcgggcaggggaccacaggctggaggggagggaggtatgggcagggtggc

SEQ ID NO: 8152 - DNA, 79 bp, homo sapiens
gattgattgtatgtaaaaatccaaattatagcagtcagaccatttaaaacaaacgattgattgtatgtaaaaatccaaa

SEQ ID NO: 8153 - DNA, 82 bp, homo sapiens
tgccctgcggctgcctcgtgtgcagattggctgtgctgaggtcttccctccctcatgccctgtggctgcctcgtgtgcagat

SEQ ID NO: 8154 - DNA, 136 bp, homo sapiens
cctctaggtggttatgtcttcctggccctcgatgctatggaagtgatccccaaaggacacagctatgccccatgtcatcaggggtagctcacctctaggtggttatgtctcctggccctcgatgctatggaagtga

SEQ ID NO: 8155 - DNA, 151 bp, homo sapiens
tgggagtgcattattagcagcttggggctggggtagtggtggggaggaaggaagactctggcaggggggagtctggggccctcagcattctctgatggttgagatgggagtgcattattagcggcttggggctggggtagtggtggggagg

SEQ ID NO: 8156 - DNA, 81 bp, homo sapiens
tgaaaccccgtctctactaaaaaaatacaaaaaaaattagccgggcatggtcacacaatgaaaccccgtctctactaaaaa

SEQ ID NO: 8157 - DNA, 98 bp, homo sapiens
ggctaattaaaaaaaattattttgtagagatggggtttcactagctgggactacaagcatgtgccaccatgcctggctaattaaaaaaaatttttttg

SEQ ID NO: 8158 - DNA, 81 bp, homo sapiens
actcatgctcagaataggatgggattaatcagggtgggcttcctggaggagcctaattactcatgctcagaataggatggg

SEQ ID NO: 8159 - DNA, 149 bp, homo sapiens
gtagagaccaccatgcccctgtcctctctcatgacaccctccccagccaaccagtccccaggtggacccctgaactagtggagagtccagcagggtgtcccggtagagaccaccatgcccctgtcctctctcatgacaccctctccagc

SEQ ID NO: 8160 - DNA, 99 bp, homo sapiens
cacatctcagacgatgggcggccgggcggagacagtcctcactttccagacggggcagccaggcagaggggctcctcacatcccagacgatgggcggcc

SEQ ID NO: 8161 - DNA, 92 bp, homo sapiens
gccaggcagcgaggcacgccaggcacacggcgtcaactctgccaggtgtataggcttcccacgtgccaggcagcgaggcacgccacgcacac

SEQ ID NO: 8162 - DNA, 82 bp, homo sapiens
ggggtttcaccatgttggccaggctggtctcactaatttttgtatttttagtacagatggggtttcaccgtgttggccaggc

SEQ ID NO: 8163 - DNA, 98 bp, homo sapiens
ttagctagactacccagagccatgagttattgcatctacaaagttttacacgtatgacgtaaaagactagtttagctagaccacccagagccatgagt

SEQ ID NO: 8164 - DNA, 122 bp, homo sapiens
tggtgaaaccccatctctactaaaaatacaaaaattaggagggtggatcatgaggtcaggacttcaagaccagcctggccaagatggtgaaaccccatctctgctaaaaatacaaaaattag

SEQ ID NO: 8165 - DNA, 74 bp, homo sapiens
gagacagagtttcattcttgtcactttatttacttatttatttatttttcgagacagagtttcactcttgtcac

SEQ ID NO: 8166 - DNA, 100 bp, homo sapiens
atatcatcctcctctcccccctggatattaccacccacctcgcagtggggtgggcacaccctgcgagatggggagtaatatcatcctcctctcccccact

SEQ ID NO: 8167 - DNA, 100 bp, homo sapiens
atggagaactggcagaagcaagagaaggaaggaaggaagggaggaagggagggaggaagggaggaaggaatgacttatggagaactggcagaagcaagag

SEQ ID NO: 8168 - DNA, 81 bp, homo sapiens
tgctcctgatgccacacacagccacacactggcacagagcggccggctttgcagcccttgctcctgacgccacacacagcc

SEQ ID NO: 8169 - DNA, 123 bp, homo sapiens
tgcctaccttttagggatttttctgaagaataaataacataatgggtattaagtacacccattatgtaggtacagcatgcctaccttttagggattttctgaagaataaataacataatgggt

SEQ ID NO: 8170 - DNA, 162 bp, homo sapiens
cagaatacagatgatcagcatgaagaacactgaatacagaatacagatgatgagcatgaagaacactgaatacagaatacagatgatcagcaagaagaacattgcccgggaggctcacttctgtctccctgcccagaatacagatgatcagcatgactgatc

SEQ ID NO: 8171 - DNA, 138 bp, homo sapiens
aacatggtgaaaccccgtctctactaaaaatacaaaaaaattctttgggaggctgaggtgggtggatcacgaggtcaggagatcgagaccatcctggctaacatggtgaaaccccgtctctactaaaaatacaaaaaa

SEQ ID NO: 8172 - DNA, 74 bp, homo sapiens
tggggacttggagaacctttgtgttgacactctgtatctagctaatctactggggacttggagaacttttgtgt

SEQ ID NO: 8173 - DNA, 110 bp, homo sapiens
ttttttcccattttgcattccaaattatgtcttaatctactttagggcaactatatccctaaggttgaacattcagatttttttcccattttgcattccaaattatgtct

SEQ ID NO: 8174 - DNA, 85 bp, homo sapiens
gtgagctcctgggcacaagcaattctgctgcctctgtcaccccacgatcacagctcactctggtgagctcctgggcgcaagcaat

SEQ ID NO: 8175 - DNA, 60 bp, homo sapiens
aggggagggaaggggagagagagagagagagagaggagagagagagagagagagagagag

SEQ ID NO: 8176 - DNA, 111 bp, homo sapiens
tggtgaaaccctgtctctactaaaactacaaaaattagctgggcgtactcaggagttcgagaccagcctggccaacttggtgaaaccctgtctctactaaaaatacaaaaa

SEQ ID NO: 8177 - DNA, 88 bp, homo sapiens
tgtgtgaatatcttagtccatctgcagtgagaaggtagggatacgggtgtgtgtgtgtatgcgtatgtgtgtgtatgtgagaatatct

SEQ ID NO: 8178 - DNA, 135 bp, homo sapiens
gaataatctgctgtaatagaagagaagtttcatgagctttgataattccatatcaatgagtgagcaaagttattttaactacatccacgaataatctgctgtaatagaagaaaagtttcatgagctttgataatt

SEQ ID NO: 8179 - DNA, 964 bp, homo sapiens
tgaaggctttctcacattcattacatttatatggtttttctccagtatgggtcctctgatgtacaataaggtatgatttagtcctaaaggactttccacagtcataacatttatagggtttcactccagtatgaattttctgatgctccttgagatttaccattttggtgaatgccctctcgcagtcagtacatttatatggtttctctccagtgtgaattctctgatgtacagttaagtgtgattttattctgaaagactccccacattcattgcacagataaggtttctcttcagtatgaatacgctgatgtataattagagaagaagaacgcatgaaggcctttccacattcagtacatttataaggtttctctcctgtatgcattctgtggtgtacagtaaggcatgaataattaatgaatgctttcccacattcattacatttatagggtttttctcctgtgtgaattcgctgatgttctgtgaaatttgcgatgcggttgaatgctttcccacattcattacattcatagggtttttccccagtgtgagttcttatatgtacgataaggcttgaattacttctataggcttttccacattcgttacatctaaaaggtttctctccagtatgaatcctctgatgcacattaaaaattgtggtattcttaaaagacttcccacactcgttgcactgatatggtttctcttcagtgtgggtcttctgatgtacactaagatatgacttgttcctaaaggctttcccacaatcatcacatttgtagggtttctcaccattgtgagtttcctgatgtcttgcaagttttgatttatcactaaaagctttcccgcattcactacatttatagggtttctctccagtttgaattctctggtgctgattaagacgggcacactggctaaaagatttcccacacacattacactgataaggtttctc

SEQ ID NO: 8180 - DNA, 71 bp, homo sapiens
ttagcatagaaatctaagcaaaatttcctctatttttggaactagtgcttagcatagaaatctaagcaaaa

SEQ ID NO: 8181 - DNA, 78 bp, homo sapiens
caagtctctaggaagttccaaacttctcacatcttcctgtcttctgagccctccaagtctctaggaagttccaaactt

SEQ ID NO: 8182 - DNA, 143 bp, homo sapiens
taagtctcctacctcatataaaaattaactcaaaatagatcaggtatttacaattggatattcataagcaaaaaaaaaaagaacttcaacatttaagtctcctacctcatataaaaattaactcaaaatagatcatgtattta

SEQ ID NO: 8183 - DNA, 97 bp, homo sapiens
atgttgctgtaaacatttatataaacatatataatattttatatataaatgttttatatatatttatatataaaatgttgctgtaaacatatatata

SEQ ID NO: 8184 - DNA, 77 bp, homo sapiens
ggattcacttttatgaatttacccagtgtattagtgcaattcatactggttcaggattcacttttatgaatttatcc

SEQ ID NO: 8185 - DNA, 135 bp, homo sapiens
aggtagtaagtttccaacacattaattttgggagacacattcgagccatatcaaagtctcccattaggtcccacctcccagtgctgttgctttaggtagtaagtttccaacacatgaattttgggagacacattc

SEQ ID NO: 8186 - DNA, 77 bp, homo sapiens
agtctctaggaagttccaaactttcccacattttcctgccttctgagccctccgagtctctaggaagttccaaactt

SEQ ID NO: 8187 - DNA, 130 bp, homo sapiens
atcagaaagagtttgcctcatgacatgttcgtgtttcttgttggaaaaaataccactggcaaaagtaagaatacacaggtatcagaaagagtttgcctcataacatgttcgtgtttcttgttggaaaaaa

SEQ ID NO: 8188 - DNA, 104 bp, homo sapiens
catctaaaaaattgccattttttaaaggcttaaattgtagtagtaaagggggaaaaaacccataaatcatctaaaaaattgccatttttaaaggcttaaattgt

SEQ ID NO: 8189 - DNA, 72 bp, homo sapiens
ctgacccccccacctccctcccggacggggcggctggctgggcggaggactgaccccccccacctccctccc

SEQ ID NO: 8190 - DNA, 175 bp, homo sapiens
cctctccgcttctcccgctttccacgatctccctctccctctcctcccgctttccacggtctcccctctacctctctccttctcccgctttccacggtctccctctgttgccgaagctggactgtaccaccatgatctcctccctctccccttctcccgctttccacggtctccc

SEQ ID NO: 8191 - DNA, 92 bp, homo sapiens
aattaggaattattcttctttagcaaccttcattatgtctcttaaagctagactcaaaaatataattaggaattattcttctgtagcaacct

SEQ ID NO: 8192 - DNA, 95 bp, homo sapiens
ctcaggcttaaagtgcaagatcctaacctcccatcacacacacacaagtttcatttaatatggcagcaagctcaggcttgaagtgcaagatccta

SEQ ID NO: 8193 - DNA, 91 bp, homo sapiens
gagtgaaagggtaaacatcataaaagttctattgtttggcctggtcagatgcctctgcagagtgaaagggtaaacaccataaaagttctat

SEQ ID NO: 8194 - DNA, 107 bp, homo sapiens
caccaggccacgcccccgtcacgcagcgccaacggccacgtgccaggccacgtgccaggccacgcccagcacccatggccacacgccaggccacgcccccgtcacgc

SEQ ID NO: 8195 - DNA, 110 bp, homo sapiens
tctcgaggtcaggagttcaagaccaggctggctcacacctgtaatcccagcactttgggaggataaggtgggcagatatctcgaggtcaggagttcaagaccaggctggc

SEQ ID NO: 8196 - DNA, 80 bp, homo sapiens
tgtggtgtaagccatcaggatggcagggcacggagagggaagtcgggggaacaccatgtggtgtaagccatcaggaggcg

SEQ ID NO: 8197 - DNA, 99 bp, homo sapiens
ctgcagagaggagctacccattccagggtctcctctctgctgagagcttcagagaacgatgggatgacctgcctgcagaaggagctacccattccaggg

SEQ ID NO: 8198 - DNA, 117 bp, homo sapiens
ctacaggcacacgccaccatgcctttgtaaaaaacaaaacaaaaaaaaattgtatttttagtagagacagggtttcgtctctgtctacaggcacacgccaccacgcctttgtaaaaa

SEQ ID NO: 8199 - DNA, 108 bp, homo sapiens; identical to SEQ ID NO: 2484

SEQ ID NO: 8200 - DNA, 167 bp, homo sapiens
ttagctagacacagagcactgattggtacatttacaatcctttagacaggaaagttctccaagtccccacctggttagctagacacagagcactcattggtgtgtttttacagagtgccgattggtgtgtttacaaacctttagctaggcacagagcgctgattggt

SEQ ID NO: 8201 - DNA, 81 bp, homo sapiens
ccccgtttttaaaatcttgtaatcttaaaaactttaatcttgtaatctttaaaactgtccccatttttaaaatcttgtaat

SEQ ID NO: 8202 - DNA, 106 bp, homo sapiens
cactgcttagaacattgatgggcggcattccctaacctggcactgcttagaacgttgatgggtggcgttccctaacctggcactgcttagaacgttgatgggcggc

SEQ ID NO: 8203 - DNA, 95 bp, homo sapiens
taggatcttgcacttcaagcctgagcttgctgccatattaaatgaaacttgtgtgtgtgtggtgggaggttaggatcttgcactttaagcctgag

SEQ ID NO: 8204 - DNA, 109 bp, homo sapiens
aagtgctgggattacaggcgtgagccaccatgcccggcccttcttcatctcttgaccttgtgatcctcctacctcgggctccccaagtgctgggattacaggcgtgagc

SEQ ID NO: 8205 - DNA, 89 bp, homo sapiens
aaaccaaacccaaaattagtagtctgtgtcctgtgaggccagccagaaacatagaaaagcaagagcaaaccaaacccaaaattagtaga

SEQ ID NO: 8206 - DNA, 96 bp, homo sapiens
ctctgtcaaaatggaccaatcagctctctgaaaaatggaccaatcggttctctgtaaaatggagcagtcggctctctgtaaaatggaccaatcagc

SEQ ID NO: 8207 - DNA, 91 bp, homo sapiens
agcagtttggaaacactctttaggtaggatctgcaaggggatatttggcgttctttattgcttttcatagagcagttttgaaacactcttt

SEQ ID NO: 8208 - DNA, 84 bp, homo sapiens
acagaagcattctcagaaacatctttgtgatggtgaaaaggaaatatcttcacataaatactgcacagaagcattctcagaaac

SEQ ID NO: 8209 - DNA, 94 bp, homo sapiens
tctgtgtgtactgatgtgtgatcgtatgtccctgtgtctgtatgtgacgtgtccacgtgtgcacgtgtccgcatctgtgtgtactcatgtgtga

SEQ ID NO: 8210 - DNA, 64 bp, homo sapiens
ctcctgtctgtcttttcttttaccgttacccatatttgctacactcctgtctgtctttcctttt

SEQ ID NO: 8211 - DNA, 103 bp, homo sapiens
cccatttctttctttctttcttttttgaaagtcatcttagtatttcttttcttttccttccttccttcctttctttctttctctttcttcctttctttctttt

SEQ ID NO: 8212 - DNA, 112 bp, homo sapiens
ttgtaaaatgcaccaatcaggaactttcctgtcttacaagaagattgtaaaatgcaccaatcagtgctctgtaaaacacaccaatcagcactctgtaaaatgcaccaatcag

SEQ ID NO: 8213 - DNA, 61 bp, homo sapiens
ttgtaaacgcaccaatcagcgctctgtgtctagctaaaggtttgtaaacacaccaatcagc

SEQ ID NO: 8214 - DNA, 66 bp, homo sapiens
cactcaacaccatgccgaagagtgcagcctccaatctgcacctgccactcaacaccatgcagaaga

SEQ ID NO: 8215 - DNA, 113 bp, homo sapiens
tgtccactctgccatgagcctgccacaccaaccacatgacagctgtccactatgccatgagcctagcttgcctagcttagctacaagacaactgtccatgctgctgtgagcat

SEQ ID NO: 8216 - DNA, 70 bp, homo sapiens
ccgggtggggggctgacccccccacctccctcccggacggggcgggtggccgggcagggggctgaccccc

SEQ ID NO: 8217 - DNA, 71 bp, homo sapiens
gcaccccccacctccctcccggacggggcggctggccgggcgggggctgccccccccacctccctcccgga

SEQ ID NO: 8218 - DNA, 123 bp, homo sapiens
gcctcccaaagtgctgggattacaggcgtgagccaccgcgcccggccggctggtcttgaactcttgacctcaggtgatctgccctcctcggcctcccaaagtgctgggattacaggtgtgagc

SEQ ID NO: 8219 - DNA, 132 bp, homo sapiens
aaaatgatctgaaagtgacaccagccatgtctagtcacagatgtggggggagatgcggacgggggctggtggcggctgggggagtaacacgctgtaaaatgatctgaaagtgacaccagccgtgtctagtca

SEQ ID NO: 8220 - DNA, 114 bp, homo sapiens
caatgagtattcataaactgagtatgatctgaaggaattgagataaattctgtggtaagcagtgatgtattcatgtaaatcagatatcaatgaatattcataaactgagtatga

SEQ ID NO: 8221 - DNA, 92 bp, homo sapiens
cgaagtctctctgtgttgcccaggctggtctattattatttttaaagataacaatagaggcgaagtctctctgtgttgcccaggctggtcta

SEQ ID NO: 8222 - DNA, 115 bp, homo sapiens
aaatgcaccaatcagcactctgtatctagctaaaggtttgtaaacacacctaatcagcactctgtaaaaatggaccaatcagcactctgtaaaatagaccaatcagcgctctgta

SEQ ID NO: 8223 - DNA, 99 bp, homo sapiens
gaatgactagttgctaaatatttcccgtatcaatggtatttcaggaatatctaaatatttcctgatcaatatatgaatgactagtttctaaatatttcc

SEQ ID NO: 8224 - DNA, 92 bp, homo sapiens
ctgccagcagagaggagctaccctccagggcctcctcgctgctgagagctgagcactcgatggggtgagctgcctgcagagaggagctaccc

SEQ ID NO: 8225 - DNA, 103 bp, homo sapiens
cagccttagaaattgcctagtaacaaacccaattggtttgttattggtttgttacttgttattggtttgttattggttttcagccttagaaagtgcctagtaa

SEQ ID NO: 8226 - DNA, 74 bp, homo sapiens
tttcctcaaatatgttttctaaacatatttggggaacatatttctaaacattccctcaaatatgttttctaaac

SEQ ID NO: 8227 - DNA, 121 bp, homo sapiens
aggtgtcctgtggcccctgttgttccggtggccctcccacttgcccactgacagaaagacctggacgcgccctctacgaggtgtcctgtggcctctgttgttccggtggccctcccacttg

SEQ ID NO: 8228 - DNA, 96 bp, homo sapiens
tccccagggcctcctctctgctgagagcagcaaacgtaggaaggaccagtagcagatagaagctaccctccccagggcctcccctctgctgagagc

SEQ ID NO: 8229 - DNA, 108 bp, homo sapiens
tgggattacaggcgtgagccaccacacccggccggtctggaactcttgacctcaggtgatccatccgcctcagcctctgggtttgggattacaggcgtgagccaccac

SEQ ID NO: 8230 - DNA, 78 bp, homo sapiens
aaagaaatcacactatgctagagaggaaggaggtggatttttaaaaaagaggaaagaaatcacactatgctaagaggt

SEQ ID NO: 8231 - DNA, 125 bp, homo sapiens
gaacataaattgtgaagatttcatggacatttattagttccccaaattaatacttttataatttcttacgcctgtctttactgcaatctctgaacataaattgtgaagatttaatggacatttat

SEQ ID NO: 8232 - DNA, 82 bp, homo sapiens
tttagtagagacggggtttcaccatgttttataacttcttgtataaaaccttttgccggtttagtagagacggggtttcacg

SEQ ID NO: 8233 - DNA, 87 bp, homo sapiens
atcagagaaaggaatcagacgatagtgcttgctggactttgttctgtctccttagaataatcagagaaaggaatcagaagatagtgc

SEQ ID NO: 8234 - DNA, 89 bp, homo sapiens
agttatttttgtctgtgcacattctaatatgtatatataagttaacatatattaatattattctccagttatttttatctgtgcacatt

SEQ ID NO: 8235 - DNA, 79 bp, homo sapiens
cccgacgccttctgggagttgtagtttcttccgctggctccgggccggccctcccgacgcctcctgggagttgtagttt

SEQ ID NO: 8236 - DNA, 518 bp, homo sapiens
acagcacaagggacgggggcaggtggaaatgacacaggttgggcgatagcaagtggtgtggcaggagactcggccacagactggacgcaggcagcagcaggggcggcagcagcacgggcggcagcagctggattcacagcaagaggggcggcagcagctggagatgcagcagctgggacggcagcaggttggctggcagcacacagactggcagcactgggacctgcagcacctggacacacagcagctggggcgacagcagctggagatgctgcagctgggacggcagcaagtgggctggcagcacacagactggcagcactggggtctgcagcagctggatacacagcagctagggcggcagcaggtggtcctgcagcaggtggtctgacagcagctgggacagcagctgggacggcagcaggtgggctggcagcacacagactggcagcactggggtctgcagcagctggacacacagcagctggggcggcagcaggtggtcctgcagcaggtgg

SEQ ID NO: 8237 - DNA, 215 bp, homo sapiens
ctgtgggtccagctgtggtcagagcagctcctgtgcacctgtgtactgcagaagaacctgctaccaccccacgactgtctgcctgcctggttgcctaaaccagagctgtggctccaactgctgccagccctgctgccgcccagcctgctgtgagaccacctgctgcaggaccacttgcttccagcccacctgtgtgtccagctgctgccagcctt

SEQ ID NO: 8238 - DNA, 88 bp, homo sapiens
aagcaaactggctttcagcaagtgggctcacagcagcagactgggcggcagcaggactgtccacagtaggacgggcggcagcaggagg

SEQ ID NO: 8239 - DNA, 70 bp, homo sapiens
caggagctgatctggcagcagcttggctggcagcagctggtctcacagcagcttggctggcagcagctgg

SEQ ID NO: 8240 - DNA, 133 bp, homo sapiens
cagaagctagtctggcagctgcgtggctggcagcagctggtctcacagcagcttggctggcagcagctggagccacaggtcccactgatggagaagctgggatatccacagaagctggtctggcagcaggtca

SEQ ID NO: 8241 - DNA, 104 bp, homo sapiens
agcacatgctggttggcctgaatttcaacgcttacttctagttactgctagtaactaggtttagggctagagccagagcacatgctggttggcctgaatctcaa

SEQ ID NO: 8242 - DNA, 68 bp, homo sapiens
ctgtgtgtccagctgctgccagccttgctgccgcccaacttgctgtcaaaacacctgctgccagccca

SEQ ID NO: 8243 - DNA, 78 bp, homo sapiens
aaaagctagagagaatgggggcatatatcaggaggcatcaaaggccagaattaggaaaagctagagagaataggggca

SEQ ID NO: 8244 - DNA, 130 bp, homo sapiens
atcacagaaagacaaatactgcatgattctgcttatatgaggtatctaaaatagattcaaccctgaagacattatgctaaatgaaataagccgatcacagaaagacaaatactgcataattctgcttata

SEQ ID NO: 8245 - DNA, 81 bp, homo sapiens
ggtgatcccgtgctccatgcagaagaaacagaagcgtctgcccagccccgtgaggccgggtggtcccgtgctccatgcaga

SEQ ID NO: 8246 - DNA, 107 bp, homo sapiens
ccaaagtgctaggattataggcgtgatccaccacacctggcccccaagctggtcttgaactcctgggatcaagcgatcctcccaaagtgctaggattataggcatga

SEQ ID NO: 8247 - DNA, 102 bp, homo sapiens
ccagcctgggcaacagagtgagactctgtcacgtgcaatggctcatgcctataatttcaacactttgggactctgagaccagcctgggcaacaaagtgagac

SEQ ID NO: 8248 - DNA, 161 bp, homo sapiens
gggtttcaccatgttggccaggctggtctcgaactcctgacctcaggtgatctgcccaccttggcatgtgccacaatgccctgctaatttttgtattttcagtagaggcgggtttcaccatgttggccaggctggtctctaactcctgacctcaggtgatc

SEQ ID NO: 8249 - DNA, 77 bp, homo sapiens
ccccatccgggagggaggtgggggggggtcagccccccgcccggccagccgccccgtccgggagggaggtggggggg

SEQ ID NO: 8250 - DNA, 76 bp, homo sapiens
gccttcccacgcactggcactactgctagaccaaggtctgctaaataacgggtgccttcccaggcactggcactac

SEQ ID NO: 8251 - DNA, 80 bp, homo sapiens
gaggatgaggcaggagaatcgcttgaaaattagctgtaatcccagctactcaggaggctgaggcaggagaatcgcttgaa

SEQ ID NO: 8252 - DNA, 102 bp, homo sapiens
gtcccagctactcaggagggtaaggcagaaggactgcttgagattgggaggcatgatggcgtgtgcctgtggtcccagctactcaggagggtgaggcagaag

SEQ ID NO: 8253 - DNA, 77 bp, homo sapiens
tgccttcccaggcactggcgctaccgcaagactgaggtctgctaagtaacgggtgccttaccaggcactggcgctac

SEQ ID NO: 8254 - DNA, 79 bp, homo sapiens
ataatttgttccataagctgttatggaaccagctaatttgtggttatggaccagataatttgttccataagctgttatg

SEQ ID NO: 8255 - DNA, 113 bp, homo sapiens
aggaactcccttacctctatatctttgtaagatatagtaagtaaggaactcccttacctctatatctttgtaagatatagtaagtaaggaactcccttacctctatatctttg

SEQ ID NO: 8256 - DNA, 112 bp, homo sapiens
atatatttagttggagttaagagcgttgggctcccataaagcagtagggctctccttgagtttagtttatatatatttagttggagttaagagtgttgggctcccataaagc

SEQ ID NO: 8257 - DNA, 94 bp, homo sapiens
tccttgcgagcaagtaggcgggtccagggtggcgcatgtcactcatcgaaagtggaggcgtccttgcgagcaagcaggcgggtccagggtggcg

SEQ ID NO: 8258 - DNA, 103 bp, homo sapiens
ctggtctcgaactcctgatctcatgatccgcccgtcttggcctcccaaagtgctgggattacaagcgtgagccaccacacctggtctcgaactcctgacctca

SEQ ID NO: 8259 - DNA, 98 bp, homo sapiens
tgtgaaccggggctgctgtgttcaatcattgagttggtgtgaaccggggctgctgtgttcagtcactgagttggtgtgaaccggggctgctgtgttca

SEQ ID NO: 8260 - DNA, 114 bp, homo sapiens
tgtagtttcagcttggggtcctttatggacttctgatcctttttatctatctttgctcaaactcatttatcctcatgtggccagtgtagttacagcttggggtcctttatggac

SEQ ID NO: 8261 - DNA, 104 bp, homo sapiens
ccatccttttctatatatatacatatacatatatatatatatatatatatatatatatatatacacacacacacacacacatatatatatatatacacacatat

SEQ ID NO: 8262 - DNA, 78 bp, homo sapiens
ttaccttatctcaagaccattttttttcctgaacagcggagcttaagaactattaccttatctcaagaccatgttttt

SEQ ID NO: 8263 - DNA, 92 bp, homo sapiens
tacttctccatatatattactaggaaaaatttttggcaggaatatccagaagtgatgctgtgtacttctccatatatattactaggaaaaat

SEQ ID NO: 8264 - DNA, 94 bp, homo sapiens
agagcaagactctgtctcaaaaaaaaaaaaaaattataccactgtattccagctggagagatagagcaagactttgtctcaaaaaaaaaaaaaa

SEQ ID NO: 8265 - DNA, 110 bp, homo sapiens
gagggtagctcctctctgcagctggtcatctcctcagctctcagcagacaggagaccctggggtgggcagctcctctggggagggcagctcctctctgcagctggtcatc

SEQ ID NO: 8266 - DNA, 127 bp, homo sapiens
aaacagttaagggagaaaaggttttcgatcagcttcgctacttcattgccgtaggttattcaagccatttctactaaaaaatatatatacacaaacagttaagggagaaaaggtttttgatcagctt

SEQ ID NO: 8267 - DNA, 93 bp, homo sapiens
tttcaaggttcatccatgttgtagcatgtgtctggtgactggcttccttcacttagcatgtttcaaggttcatcctgttgtagcatgtgtctg

SEQ ID NO: 8268 - DNA, 128 bp, homo sapiens
ttttctagagacagggtcttgctctgttgaccaagctggagtacttttctaatcaggaaaagaaattcttcattttatttatttattttctagagacagggtcttgctctgttgaccaagctggagta

SEQ ID NO: 8269 - DNA, 93 bp, homo sapiens
ggtcaggagtttgagaccagcctggccaacctggtaaaaccccatctctactaaaaattaactggtcagaagtttgagaccagcctggccaac

SEQ ID NO: 8270 - DNA, 102 bp, homo sapiens
agagcgagactctgtctcaaaaaaaataaaaaataaaaataaaagaaaaaagaaaatttaaagtaggctgggtgacacagcaagactctgtctcaaaaaaaa

SEQ ID NO: 8271 - DNA, 91 bp, homo sapiens
tagatgctgtagttggtgaaagagagaagagattaaaagaaagaaagaaagaaagaaaacagtcccttagatgctgtagctggtgaaagag

SEQ ID NO: 8272 - DNA, 90 bp, homo sapiens
agggctctgagctcctggtcctgccttggtaaataaccgtcttcccgccctggggagccaagggctctgagctcctggtcctggcttggt

SEQ ID NO: 8273 - DNA, 83 bp, homo sapiens
taccagattctaagattggagacccgagagagagagagcgaaagaaaaaataaaaatctataccagcttctaagattggagac

SEQ ID NO: 8274 - DNA, 72 bp, homo sapiens
agctccccgtgtgcaccctgctccattctcacgccttacttatgccatcagctccccctgtgcaccctgctc

SEQ ID NO: 8275 - DNA, 87 bp, homo sapiens
tgactttttaaactaaagtgttacaatttgacagaaaggaaaactgaggttcaaagataagtgactttttaaactaaagtgttacaa

SEQ ID NO: 8276 - DNA, 135 bp, homo sapiens
ttctcttttaataattctgaaacaggataaaaatattgttctaggcatgttctctacctcccagttttgagtatatttttgccagcaataagttctcttttaagaattctgaaacaggataaaaatattgttcta

SEQ ID NO: 8277 - DNA, 109 bp, homo sapiens
ttattttaatttttgtgggtacatagtaggtacatagtacatacatattttaatttatgtgggtacatagtattaaaataaaaattattttaatttttgtgggtacata

SEQ ID NO: 8278 - DNA, 106 bp, homo sapiens
tactaggcttagtacctgggtgatgaaatcgtctgtacaacaattccccacaaaatgaatttgccttaactatggggtactaagcttagtacctgggtgatgaaat

SEQ ID NO: 8279 - DNA, 103 bp, homo sapiens
ttttctaagcatatatttatatatatatttacttagatgtatattttctaagtaatatatatatttacttgtatatatattttctaagtatatatttatatat

SEQ ID NO: 8280 - DNA, 104 bp, homo sapiens
ttcttcagaccacattgatacctccttcagacaacattgcatccagtggtacctccttccactggtaccactggatgtatccttcagaccacattgcatccagt

SEQ ID NO: 8281 - DNA, 126 bp, homo sapiens
catcgatagggtgtccatttaactggaatgaactcttactgattagggtaagagttctcatagggtaagagtactgatagggacatcgatagggtgtccatttaactggaatgaactcttactgat

SEQ ID NO: 8282 - DNA, 113 bp, homo sapiens
gcaccaatcagcactctgtgtctagctaaagatttgtaaacgcaccaatcagcactctgtaaaaacggaccaatcagcactctgtaaaatggaccaattggcactctgtaaaa

SEQ ID NO: 8283 - DNA, 93 bp, homo sapiens
tttagcaatactgattcttccaattcatgaacctaaaatatctttcaatttttagaaatactttagcaatattgattcttccaattcatgaac

SEQ ID NO: 8284 - DNA, 132 bp, homo sapiens
agactttgttttatatatactaggctcccaagagtattttttggctccttttctgagcaaaaaaggcactagctgaggagttacaggccagagactttgttttatatatattaggctcccaagagtattttt

SEQ ID NO: 8285 - DNA, 63 bp, homo sapiens
acatacacccttaagtaacctagtgggtatcttgccacaatataggagcttaagtaacataca

SEQ ID NO: 8286 - DNA, 122 bp, homo sapiens
aatgtccatgaaatcttcacaatttgtgttcagagattgcagtcaagacaggcataagaaattataaaagtattaattttgggaactgataaatgtccatgaaatcttcacaatttatgttc

SEQ ID NO: 8287 - DNA, 91 bp, homo sapiens
gctttcagaggcagaaatgcaggaaaaagtacaatgactatactgaacccactgtattactttgctttcagaggcagaagtgcaggaaaaa

SEQ ID NO: 8288 - DNA, 122 bp, homo sapiens
gtgagtaaatgagttaatatatgtaaaatacttacaatacttatatgtaaaatacttataaatacttacacgtaaaatacttactttagtgagtaaatgagttaatatatgtaaaatactta

SEQ ID NO: 8289 - DNA, 110 bp, homo sapiens
tgctgattggtccattttacagagtgctgattggtccattttacagagctctgattggtccattttacagagtgctgattggtccattttacagagagctgattggtcca

SEQ ID NO: 8290 - DNA, 96 bp, homo sapiens
caatcacaaatattcacagcagaatggacaaagcagaggaaagaactcacttcaagaatttcataatgcaatcacaaatatttacagcagaatgga

SEQ ID NO: 8291 - DNA, 106 bp, homo sapiens
attctatcagatgtataaagaagaactggtaccatttctactaaaattattccaaaaaattcacagcctaattctaccagatgtataaagaagaactggtaccatt

SEQ ID NO: 8292 - DNA, 95 bp, homo sapiens
tttggttcacgcacagaattgtgaccagaatagtgacacctttactttctgatggttcaatgatcacaaatttggttcacgcacagaattgttac

SEQ ID NO: 8293 - DNA, 103 bp, homo sapiens
taatacttaaaagtatgaagttaatataagtattaagttaattaatacttattaatacttaataagaagtatataaagttaatataagcattaagttaattaa

SEQ ID NO: 8294 - DNA, 133 bp, homo sapiens
tcccctcaagtatttatcctttgagttacaaacaatccaattaactctttaagttattttaaaaagtacaattgttgttattgactatagtcagtcccctcaagcatttatcctttgagttacaaacaatcca

SEQ ID NO: 8295 - DNA, 114 bp, homo sapiens
gtcagttactgccactaaaattacagctgttggtcaccccttagtggaaagaggcaatctcctccctcctcttccttcgtcagttactaccactaaaattacagctgttggtca

SEQ ID NO: 8296 - DNA, 111 bp, homo sapiens
ctgccttgtctgctttagagcactggtcagtaagtgacaagctagcttttgacaccagggaacctgcctgttcctccctgccttgtctgctttagagcattggtcagtaag

SEQ ID NO: 8297 - DNA, 88 bp, homo sapiens
taagacttgaaggctgggcacagtatatacagcagcgatagacttaagtatatttcttaaatagtaagacttgaaggctgggcacagt

SEQ ID NO: 8298 - DNA, 99 bp, homo sapiens
gtctttggcaatcttgggatatgctatcctcagtttaatccaacccttaggatttcttttagaatggttctaatggtctttggcaatcttggaatatgc

SEQ ID NO: 8299 - DNA, 112 bp, homo sapiens
cacatgtgagatcttgttgggtcaaactatagaataataactaacaactaataataataacttcttccagttagtgacacatgtgagatcttgtcgggtcaaactatagaat

SEQ ID NO: 8300 - DNA, 89 bp, homo sapiens
tcattcctttttatggctgagtagtattccattttttatatatatatatatatatatatatatgtatcattcctttttatggctgagta

SEQ ID NO: 8301 - DNA, 90 bp, homo sapiens
tgtagagattagtactaacatcacggaaaatagtaaatcaaaagcaatactacatccttggaagtactgtagagattagtactaacatca

SEQ ID NO: 8302 - DNA, 92 bp, homo sapiens
ccatgcccatgagaaagatgggagcatttggtttgctgtctgaattgtggacaagggagtattacaaccatgcccatgagaaagatgggtgc

SEQ ID NO: 8303 - DNA, 101 bp, homo sapiens
ttgcccaggctggtcttgaactcctgggctcaagccttccaaagtgctgggactgaactcccagcactctgcccagtttgcccaggctggttttgaactcc

SEQ ID NO: 8304 - DNA, 123 bp, homo sapiens
tgagctgagtttgccccactgcactccagcatgagctactcaggaggctgaggtgggaggatgattgagcccaggaggtggagattatagtgagccgagtttgccccactgcactccagcatg

SEQ ID NO: 8305 - DNA, 87 bp, homo sapiens
gcccctacctccggggggatgctgtcctccagtggtggttggaattacccgggctgcgcccctacctccggggggatgctgtcctcc

SEQ ID NO: 8306 - DNA, 80 bp, homo sapiens
ccagctaatttttgtatttttggtagctgggattacaggcatgagccaccacgtccagctaatttttgtatttttagtag

SEQ ID NO: 8307 - DNA, 90 bp, homo sapiens
atggtctgtcattgactgaatgtcattatttacaatcttacgggaccactgttccatatatatggtctgtcattgactgaatgtcattat

SEQ ID NO: 8308 - DNA, 103 bp, homo sapiens
tcactgttggagtggaaattttatgtacactaacattgaccaagaagaaaatagatagcagatagtgggagccaggtttttcactgttggagtgaaaatttta

SEQ ID NO: 8309 - DNA, 122 bp, homo sapiens
tctctactaaaaatacaaaaattagccgggcagacagatcacctgaggtcaggagttcgggaccgccctggccaacatggtgaaaccccatctctactaaaaatagaaaaattagccgggca

SEQ ID NO: 8310 - DNA, 101 bp, homo sapiens
ctttctttctgaaattgcagctgatccttcctcccctccctccctccctctctctctctccctctctctctctctctttctttctgaaattgcagctgatc

SEQ ID NO: 8311 - DNA, 116 bp, homo sapiens
tgatccgcccgccttggcctcccaaagtgctgggattacaggcgtaagccaccacgcccagtcgatggtctcgatttcttgacctcgtgatccacccgccttggcctcccaaagtg

SEQ ID NO: 8312 - DNA, 219 bp, homo sapiens
gccataatgtactttgtgatattctctgcccccccattccccccccgcaccccccccacccccgcgaatgtactttgtacaatacaccctccccacccttgaggaggtactttgtaatatcctgccctgcctttaagaaggtactttgtaatattcttcccccaacccccccccctccggccgccccatccccccttaagaagatactttgtaatattc

SEQ ID NO: 8313 - DNA, 107 bp, homo sapiens
gcaacagagcaagaccctgtctcttaaaaataaaaataaatatatatatgatatgtagaccaagcaagcaacagagcaagaccctgtctcttaaaaaataaaaataa

SEQ ID NO: 8314 - DNA, 105 bp, homo sapiens
catttttaacccgtatgttaaggttgtctttgatatgatagcttatttatatattcatacacattctataaaaccatttttaacccatatgttaaggttgtcttt

SEQ ID NO: 8315 - DNA, 95 bp, homo sapiens
gagctcaggagttcgagaccagcctaagcaatatagtgagatccctgtctgtacgaggcaggcaaatcatgaggtcaggagttcgagaccagcct

SEQ ID NO: 8316 - DNA, 163 bp, homo sapiens
atctcttacagtatcacacttcgttacccagtattgtgtgtgtgtgtgtgtagagatacatctcttacaatatcacactttgttacccagtattgtgtgtgtgtgtgtgtgtgtgtgtagagatatatctcttacaatatcacactttgttacccagtattgt

SEQ ID NO: 8317 - DNA, 102 bp, homo sapiens
aatcttccacagaaataattcctatttttttctgtcaagtgaagttaacattgccagcatggcagcatgaatcttccacagaaataatttctatttttttct

SEQ ID NO: 8318 - DNA, 73 bp, homo sapiens
ccaccatgccaggctaatttttgtgagtagctgggattacaggcatgccccaccatgccgggctaatttttgt

SEQ ID NO: 8319 - DNA, 110 bp, homo sapiens
ggattacaggtgcgagccactgcgcctggtctcaagctcttgagctcaagcaattgtctgcctcagcctcccaaagtgctaggattacaggtgtgagccactgcgcctgg

SEQ ID NO: 8320 - DNA, 110 bp, homo sapiens
cagcctggctaatgtggtgaaacctcgcctacactttgggaggctgaggtgggtggattacttgagagatcaggagttcaagatcagcctggccaatgtggtgaaacctc

SEQ ID NO: 8321 - DNA, 114 bp, homo sapiens
gggggcacagggcactcaccttccatggcatccctatcctcctgaatccagtccagccaggctccacccctacctaagtgggcacgggggcacaaggcactcaccttccatggc

SEQ ID NO: 8322 - DNA, 137 bp, homo sapiens
aggacaccagtcctacagggtttcttacacacacacacacacacacacacacacacacacacacacacacacacaagctcgctgtctctttctctcataggacaccagtcctacagggtttcttatacacacacaca

SEQ ID NO: 8323 - DNA, 123 bp, homo sapiens
ggattgtaaaatgcaccaatcagcactctgtaaaaatgtaccaatcagcactctgtagctagcaaaaggattgtaaaatgcaccaatcagtgccctataaaacgcaccaatcagcgctctgta

SEQ ID NO: 8324 - DNA, 83 bp, homo sapiens
gaactcctgggctcaagtgatccttgtgcctcagcctcatcacagctcactgcagcctcgaactcctgggctcaagtgatcct

SEQ ID NO: 8325 - DNA, 67 bp, homo sapiens
ccactagggagtgatgggtgcaggctacagactctaggctagggacactagggagtgatgggtgcag

SEQ ID NO: 8326 - DNA, 100 bp, homo sapiens
agatacatagatatgaatagataggcttaaggtgtaagaaataatccttcaaatattttcatatgtagctagatagatacatagatatgaatagataggc

SEQ ID NO: 8327 - DNA, 113 bp, homo sapiens
ataatcttttaaagtaaaaatataaattaaatgcagcatagtattaaatattatgaaaatgtaatgctgacataaaaatataatcttttaaagtaaaaatagaaattaaatgc

SEQ ID NO: 8328 - DNA, 102 bp, homo sapiens
aatggacactaatataggagaaataaattatggtttatttataataaaaatggacaatataataaaaatggacaataatataggagaaataaattatggttt

SEQ ID NO: 8329 - DNA, 97 bp, homo sapiens
ttgctccattgattacttagattttttgggacacaagggcccacgttgtgtcttcctgacaacacttttagttgctctattgattacttagattttt

SEQ ID NO: 8330 - DNA, 86 bp, homo sapiens
aaaaaatagtctctatctttgcaacagaggttatatatattttatcacaattaaaaaaaaaatagtctctatctttgcaacagagg

SEQ ID NO: 8331 - DNA, 97 bp, homo sapiens
cattttacaaacctctagctagccacagagtgctgattggtgtgtttttacagagtaccaattggcgcattttacaaacctgtagctagccacagag

SEQ ID NO: 8332 - DNA, 105 bp, homo sapiens
cttggaaaacctttatgtctagctcagggtttgtgagtgcaccagtggacactctatctagctactctggtggggccttggagaacctttatgtctagctcaggg

SEQ ID NO: 8333 - DNA, 132 bp, homo sapiens
atttgcttcagcatcaaagagcatgtttctgtaaaaggaaggaaaggaagggaaggggagggaggagggaggcggggaaggaaggaaatccgtgatatttgcttcagcctcaaagagcatgtttctgtaaaa

SEQ ID NO: 8334 - DNA, 83 bp, homo sapiens
cagaatttgaacctaagagtcaagaagatagtgcagaatttaatgcaaaaccgaatgcagaatttgaacctcagagtcaagaa

SEQ ID NO: 8335 - DNA, 83 bp, homo sapiens
cattatcttctcatatctttccaaggatgttatgttaaggttgttttatggatgcattatcttctcatatctctccaaggatg

SEQ ID NO: 8336 - DNA, 77 bp, homo sapiens
ttcttcacagattatattacatgtgaatataattatattatattactgtgacgttcttcacagattttattacatgt

SEQ ID NO: 8337 - DNA, 81 bp, homo sapiens
gtggtcaattctaaattgtgtgtgtgtgtgtgtgtgtgtgtgttataatgttgcgtggtcatttctaaattgtgtgtgtgt

SEQ ID NO: 8338 - DNA, 80 bp, homo sapiens
aagagcccgcaacctagatctcttgagtgacagatcatcaggcattggatactcataaggagcccgcaacctagatctct

SEQ ID NO: 8339 - DNA, 89 bp, homo sapiens
aaatatatgcttatagaactgcatatatgtgaacacaatttgtgaactactaattattcttgttacaaacatatgcttatagaactgca

SEQ ID NO: 8340 - DNA, 104 bp, homo sapiens
tcattattacaaacaattctgcctgaggggaggggagggaagaggagagcagaggagaggagaggaggggagaggagttcattattacaaacaattctgcctga

SEQ ID NO: 8341 - DNA, 135 bp, homo sapiens
cccggctaattttttgtacttttagtagagatggggttccagcgattctcccgcctcagcctccggagtagctgggattacaggcgtgtgccccacgcccggctaattttttgtatttttagtagagatggggtt

SEQ ID NO: 8342 - DNA, 79 bp, homo sapiens
tttcactcaacagaagttgaatgaatgcgtaaggaaattcgaattttgtatgactttcactcaacagaagatgaatgaa

SEQ ID NO: 8343 - DNA, 156 bp, homo sapiens
ctagatacagagtgtctacacaaaggttctccaaggccccaccagagtagctagatacagagtgtcgattggtgcattcacaaaccctgagctagacacagggtgctgattggtgtgtttacaaaacttggactagatacagagtgccgattggtg

SEQ ID NO: 8344 - DNA, 87 bp, homo sapiens
attaaatggacagaaaactttttgatttttttgaatcataaatttaacaccatgagtgggattaaatggaccgaaaactttttgatt

SEQ ID NO: 8345 - DNA, 121 bp, homo sapiens
ctttctcccttgaggagctcttagtaagaagtaaagagtggtcatgtggagtctagcatgttaggttcttctcctaaactcattctttctcccttgaggagctcttagttaagaagtaaag

SEQ ID NO: 8346 - DNA, 76 bp, homo sapiens
aatatcagatagaaatttattttttagaattctcatttatcgaataatggtgaatatcagatagaattttattttt

SEQ ID NO: 8347 - DNA, 97 bp, homo sapiens
gaggaggccctggagagggtagctcctctccggagctggttgtcccaatatctgctcctctcagcagggaggaggccctggagagcgtagctcctct

SEQ ID NO: 8348 - DNA, 102 bp, homo sapiens
tcaaagatcagatagttgtagatatgtcagatagtagatatgtcagacagttgtagatatgacagataaaactatctgtcaaatatcagatagttgtagata

SEQ ID NO: 8349 - DNA, 90 bp, homo sapiens
ggtgtacgtatcttaaaaagattataaaaaaggaaacatcatcctgaagatattaacaggtgtacatatcttaaaaagattataaaaaag

SEQ ID NO: 8350 - DNA, 99 bp, homo sapiens
aaattattttaggaagctggaggatcccaaaatgtaaccttactgtattacaaaataatgatctttaaataaattattttaggaagctgcaggatccca

SEQ ID NO: 8351 - DNA, 89 bp, homo sapiens
atgggacttagaaaattaagacactataaagcaaagtaaatactaagtaaagcaatactaaggaatgggacttagaaaattaagaccct

SEQ ID NO: 8352 - DNA, 94 bp, homo sapiens
aattattaatttctcaatccaggatctatagaggatttaattattgagaaatattaataattgagaaattattaatttctcaatccaggatcta

SEQ ID NO: 8353 - DNA, 99 bp, homo sapiens
aaaaaagaaaaattggcgccactgcacttcagcctggggaacagagtgagactccgtctcaaaaaaaaaagaaaaaagaaaaattggcaccactgcact

SEQ ID NO: 8354 - DNA, 99 bp, homo sapiens
ctcaaaaatgaataaataaataaataataaataaataaaatgcaatgcgaattatgcctgctcatttgacttggggaatacataaataaataaataata

SEQ ID NO: 8355 - DNA, 123 bp, homo sapiens
tttacagatggggaaactgaggctcagagaccatgtgacccacctgtgccacctcatttagtcctcccaactttgccataggcaccagtttacagatggggaaactgaggctcagggaccatg

SEQ ID NO: 8356 - DNA, 107 bp, homo sapiens
ggtcacctgacattattggctgttgggattagccaaaccggttacctgactggactcagtcaggattggccacaacaggtcacctgacattattggttgttgggatt

SEQ ID NO: 8357 - DNA, 81 bp, homo sapiens
ggtgcagggtatggaggaggggggtgtggggagggtgggggagatgccggcctcactaggtgcagggtacggaggaggggg

SEQ ID NO: 8358 - DNA, 93 bp, homo sapiens
aaacaacaaatgctggtgagaatgtgtatatatatatgtatagaaacaacatgtataaaacaacagaaaacaacaaatgctggtgagaatgtg

SEQ ID NO: 8359 - DNA, 126 bp, homo sapiens
catggaggcagagccatggagggcagagcatggagggcagagtgtggaaggcagagccatggagggcagagggtggagggcaatgtggagggcagaccgtggaaggcagagccatggagggcagag

SEQ ID NO: 8360 - DNA, 93 bp, homo sapiens
ttttacaccctgccctcttggtacagagttaagtgttaaccagctcagtggagagccagggtgacagccttttacaccctgctctcttggtac

SEQ ID NO: 8361 - DNA, 109 bp, homo sapiens
acaccctgctaatttttgtatttttagtagagacggagtttcaccacggtggccaggctgggtggcacctgtcacaacaccctgctaatttttgtatttttagtagaga

SEQ ID NO: 8362 - DNA, 142 bp, homo sapiens
gaggtgtcttcagccagctttggtgtggggttgtgagcccctgagatgcatgtcccgggtgctgtttgtcccacatatgctgagcctttgaggtgtcttcagccagctttggtgtggggttgtgagcccctgagatgcatgt

SEQ ID NO: 8363 - DNA, 131 bp, homo sapiens
atgctaagcccatccagtaccctcccccatccctgtgcccatccctccagagtctacactcgccctgaggctttgcccccaacaccaagctacatatgctaagcccatccagtaccctccccccatccctg

SEQ ID NO: 8364 - DNA, 89 bp, homo sapiens
ctgcttttctgggggaggggcaagtaccacaaccccttctctccgtgtctctaccccttctctgcatttctgggggaggggcaagtacc

SEQ ID NO: 8365 - DNA, 77 bp, homo sapiens
ctggttgccctggttcgcaggtgggcactaccaagcgtggggttgggagggactggttgccctggttcgcaggtggg

SEQ ID NO: 8366 - DNA, 85 bp, homo sapiens
cctgtaatcccagcactttgagagactaaagagggttgcttgctgggcacggtggctcacgcctgtaatcccagcactttgggag

SEQ ID NO: 8367 - DNA, 122 bp, homo sapiens
cacccctcagaacggatgctgaggcccaggaaagaggggccgtgggaggagagggggaggtggcgagcgcgcccagggcaggggctgctacacccctcagaacggatgctggggcccaggaa

SEQ ID NO: 8368 - DNA, 98 bp, homo sapiens
gcctcctctctgctgatagctgcagagatgtccataagaccagctgcagagaggagctacgcactccagggcctcctctctgctgagagctgcagaga

SEQ ID NO: 8369 - DNA, 80 bp, homo sapiens
catttacatagggcgtacaccgagtgaatgactttgtaactttacttcatcccttcatttacatagggcgtacaccaagt

SEQ ID NO: 8370 - DNA, 88 bp, homo sapiens
ttttttgtttttttaagatggggtctctctgtgtcgcccaagctggacagcagtgtttaattttttttttttttttaagatggggtct

SEQ ID NO: 8371 - DNA, 97 bp, homo sapiens
agaaaagcgggacttaccgctaagggtgaaggagaaggggttgaggggtacttgcccctccctcagaaaagcgggacttgccgctaagggtgaagga

SEQ ID NO: 8372 - DNA, 135 bp, homo sapiens
cttcctcgggatccaggagagacccttccttgcaaggcctcgtctccccttatgctccacatagctgcactgccctggcccctgcccttcattcttcctcgggatccaggagagacccttccttgcaagggcctc

SEQ ID NO: 8373 - DNA, 149 bp, homo sapiens
tgttttgatttgtgtaatttagccaagactttctgtgaccaaaaagttatgtctgttgtaacttggtacagagtttggattttggggtttttttgttttgttttgatttgtgtaatttagccaagactttctgtcaccaaaaagttatg

SEQ ID NO: 8374 - DNA, 97 bp, homo sapiens
acgctggttctatccccctttcttacaagaccatccatggggatgtgggaggcggggacacacgctggttctatccccgtttcttacaagaccatcc

SEQ ID NO: 8375 - DNA, 97 bp, homo sapiens
gccccgtggcacgctgggagttgtagttcgcgctccctcgcggcgggcgtgcgcgagcgtctgcgaacgggccccgtggcacgctgggagttgtagt

SEQ ID NO: 8376 - DNA, 117 bp, homo sapiens
cctgtaatcccagcactttgggaggccaaggcggacggatcatgaggtcaaggtatcgagatcaggccgggcacggtggttcacacctgtaatcccagcacttcgggaggccaaggc

SEQ ID NO: 8377 - DNA, 91 bp, homo sapiens
tggagatggcgcagcaggagaggaagactaacaggctgccacgttcctcctgacggggatcatggagacggcgcagcaggagaggaagact

SEQ ID NO: 8378 - DNA, 108 bp, homo sapiens
tggaatcccagcactttgggaggccaagacgggcagatcacgaggtcaagagatggagatcagccaggcgcagtggctcacgcctggaatcccagcactttgggaggc

SEQ ID NO: 8379 - DNA, 79 bp, homo sapiens
cccgccagactctgcatctctaaagtgctgggattccgggtgtgagcccccacgcccgccagactctgcatctctaaag

SEQ ID NO: 8380 - DNA, 99 bp, homo sapiens
gcaagtcaaaaccacagtgagacacaactctacaaccaccaatacacacatgaacaggtgtatcatcagggaaacgcaaatcaaaaccacagtgagaca

SEQ ID NO: 8381 - DNA, 106 bp, homo sapiens
agtgatcctcccaactcaacctcccaaagtgctgggattacatgtgtgagctcaaactcttgggctcaagtgatcctcccaactcaacctcccaaagtgctgggat

SEQ ID NO: 8382 - DNA, 156 bp, homo sapiens
acacacacatgcacggatgccctgatacccctgcacacgcacacagctgcatgtgtatctgcacacacacacatgcatggatgcccttatccacccccctcacaaacagctgcgtatacatgcatggtcacatacacacctctgcacgcagaacct

SEQ ID NO: 8383 - DNA, 78 bp, homo sapiens
ccttgaacccctccagcttgaaccctctccaccccctccctgagccccctccaccttgaacccctccatcttgaaccc

SEQ ID NO: 8384 - DNA, 77 bp, homo sapiens
gtggatcaccagaggtcaggagttcaagaccagcctggccaacatggtgaaagagggatcaccagaggtcaggagtt

SEQ ID NO: 8385 - DNA, 109 bp, homo sapiens
ggggcggggcccacatctggggcagcctcacctttctgagaacgagctggtggggtggggctttgggggcggggcggggtggggcccacatctggggcagcctcacctt

SEQ ID NO: 8386 - DNA, 147 bp, homo sapiens
ctcgctgctgctgggatctcggggccagatggagccgccttctgagcgctggggtctcactgctgctgggatctcgggctgctccatttgtgctctctcttttccaggtcctggacatctgtgtctcgctgttgatgggagagcagt

SEQ ID NO: 8387 - DNA, 71 bp, homo sapiens
atcaaagggaggaaagaaaacaaatttttcaaaggaaaagtttttcttatcaaaggaaagaaagaaaacaa

SEQ ID NO: 8388 - DNA, 77 bp, homo sapiens
tgtctctggacaggcctgttgtgggcaccatgccgacgtggaatcaccgtgtgtctctggacaggcctgctgtgggc

SEQ ID NO: 8389 - DNA, 76 bp, homo sapiens
gagacagagaaggccccacagtgacatctggaccgaccagtattacaaggccggagacagagaaggccccacagtg

SEQ ID NO: 8390 - DNA, 95 bp, homo sapiens
tcttccacagaagctgtcatcagcgaggaggggctgttgaggggacacatttgtgaagccagcatctttcacagaagctgtcatcagcgaggagg

SEQ ID NO: 8391 - DNA, 79 bp, homo sapiens
tgctccagcatccccgtccctttaggacagaggcctgcgtggtacgtgcctctctgctccagcatccccgtccctttag

SEQ ID NO: 8392 - DNA, 75 bp, homo sapiens
cccccaggctcttccaagcccggccctctgctgccacacatgctgcgcggcccccaggctcttccaagcctggcc

SEQ ID NO: 8393 - DNA, 113 bp, homo sapiens
agccctgtcctcaccgccttacaccccggatcccagacaccacagccctgtcctcaccaccttacacccccgctcccagacaccagagccctgtcttcaccgccttacacccc

SEQ ID NO: 8394 - DNA, 87 bp, homo sapiens
atgccgcaggtgttttaaaggggagcaagggagataaaacggtaatcacaagccatgtgacgatgccgcaggtgtttaaaggggagt

SEQ ID NO: 8395 - DNA, 84 bp, homo sapiens
tactggagtggggaaattctaactatggccctccccctccttcttcttttaaaatagtactggagtgtggaaattctaactatg

SEQ ID NO: 8396 - DNA, 98 bp, homo sapiens
caaggagagaaccaggacagccccacgctcggggcgaaagacagcgcagcgggcctttcatggttcactctgccacaaggagagaaccaggacagccc

SEQ ID NO: 8397 - DNA, 104 bp, homo sapiens
ccccttccaggatgcctgtgtgtccccggcccggccgcagcagccctgccttcccccactcctcagtggcagccccttccaggatgcctgtgtgtccccggccc

SEQ ID NO: 8398 - DNA, 105 bp, homo sapiens
gggctgagccccaggtcttacagagacaacaaagggccgggggtgggatggggagctgggccttggcgccggcggcagggctgagccccaggtcttacagggaca

SEQ ID NO: 8399 - DNA, 83 bp, homo sapiens
cgttctgctgggaccccccctttgagggtcccactctccacttcttctcccccccgccgttctgctgggacccccctttgaga

SEQ ID NO: 8400 - DNA, 75 bp, homo sapiens
accccgtctctactaaaaatacaaaaaaaatacaaaaaaatacaaaaaaaataccccgtctctactaaaaataca

SEQ ID NO: 8401 - DNA, 79 bp, homo sapiens
gctgccgggccagtgcggggatccgggcagcgtgtggagtgcggtgctcaggccgagctgcggggccagtgcggggatc

SEQ ID NO: 8402 - DNA, 129 bp, homo sapiens
tgctgccactagaacaggacagggcacacctgcttaaggggacaaaaggaaacatcaaaacagccaagtgagaggcaaccacggagttgctgccactagaacaggacagggcacacctgcttaagggga

SEQ ID NO: 8403 - DNA, 93 bp, homo sapiens
gccactgtgtgcccatccctgtcccagagagcacgtcacgaggctcagccccatcccgtgccactgtgtgcccatccccgtcccagagagcac

SEQ ID NO: 8404 - DNA, 88 bp, homo sapiens
ctgggtgacagagccaggccctgtctcaaaggacaaaaaaaaaagaagtttttgggttctgggtgacagagccaggccctgtctcaaa

SEQ ID NO: 8405 - DNA, 80 bp, homo sapiens
catggtgcctgtgtcggctccgtgcctgtgtcagctcaccgtgcctgtgtcagctccgtgcctgtgtcagctcatggcgc

SEQ ID NO: 8406 - DNA, 89 bp, homo sapiens
tctgctggaaggagtctctgaggtcaccaaccacgccgggctggggccctgcgaccgaggcatctgcgggaaggagtctctgaggtcac

SEQ ID NO: 8407 - DNA, 85 bp, homo sapiens
actctctctccagccatttcacttagaaaccgcgcaggacggagaacctggctctgctgtaactctctctccagccatttcactt

SEQ ID NO: 8408 - DNA, 81 bp, homo sapiens
ctctctttgctctaagcccccaaaccatggcagaggcccctgacagccgtgtctctctctctgctctaagcccccaaacca

SEQ ID NO: 8409 - DNA, 84 bp, homo sapiens
accgaaaatgcaatgcaaaattaacgactttaccaactgtccgtccgtcagggtacacgccaccgaaaatgcaatgcaaaatta

SEQ ID NO: 8410 - DNA, 166 bp, homo sapiens
ctggctttattacctgagcaggtgtgtcttcacaccttgttttattatgtgtgtcttcacaccacccactggctggctttattatctgagcaggtgtgtgttcacaccaccccccagctggcttcatgccccgccccggctggctttgttatctgagcatctgagc

SEQ ID NO: 8411 - DNA, 92 bp, homo sapiens
ccacaggcgtgactggtggtctgtctggctgtctccttcctgttttgatcgtaggtgtgggatctgcaccacaggtgtgactggtggtctgt

SEQ ID NO: 8412 - DNA, 101 bp, homo sapiens
tgtgattgtcaaccgtggcataaaaaggcggctctggacagcgcctgctttccctttcgctgggtgctcagcatgtgattgtcaaccatggcataaaaagg

SEQ ID NO: 8413 - DNA, 227 bp, homo sapiens
tgttaatacacatgttggtactcttggtggtaccctatgagtctcttaggttttgcactcatttcagctcttgagtcttcttgttatgttaatacacatgttggtacgcttgatggtgccctatgagtttcttaggttctgccctcatttcagctcttgagtcctcttgttatgttaatacacatgttggtaagcttgatggtgccctatgagtctcttaggttctg

SEQ ID NO: 8414 - DNA, 109 bp, homo sapiens
gattcttgggcgcaggtgatcgacaaccagagcagaagtgtgtggaggaacattccggaggtcttggtcaccctgcaggcagcagattcttgggcgcaggtgatcggca

SEQ ID NO: 8415 - DNA, 79 bp, homo sapiens
gctgggggtgttggtctttcaagctcggggtccgggatctggggtccgtgctggtgctggggtgttggtctttcaagct

SEQ ID NO: 8416 - DNA, 101 bp, homo sapiens
tttattttatttctgagacagagtttcactcctgttgcccaggctgaagtgcaatggtgcgatctcggcttattttttattttttttctgagacagagttt

SEQ ID NO: 8417 - DNA, 101 bp, homo sapiens
aataatagtttcttcatgattttgggagggctgggagcattgtgtatataatagtttaatataataataatattataataatagtttcttcatgattttgg

SEQ ID NO: 8418 - DNA, 140 bp, homo sapiens
gtgctctgtggtgaaactgtgtttaatcctacagtaccattttcatgttacactgaattactgctggacctgtcgtactgctgttgtacagcatggtcgtgctctgtggtgaaactgtgtttaatcctacaagtaccatt

SEQ ID NO: 8419 - DNA, 114 bp, homo sapiens
tatatatatacacatacatatatgtagattccatcatatatgggaacaaaagtttccatcatatatgtatatatatacacacacatatatttatatatagattccatcatatat

SEQ ID NO: 8420 - DNA, 75 bp, homo sapiens
tatttatgcataaatacttaggatttgttgtttgctaggatttgtttatgtatatatatgcataaatacttagga

SEQ ID NO: 8421 - DNA, 93 bp, homo sapiens
ttacttcttctttcccaattgggatggcattattattattattattattgttgttattattattattttacttcttccttcccaattgggatg

SEQ ID NO: 8422 - DNA, 104 bp, homo sapiens
agaaagcacagaaggaggccaatatggctagcatgtagcaacagaaaaagtcttggggcatattctagaaagcacagaaggaggccaatatggctagcaggtag

SEQ ID NO: 8423 - DNA, 123 bp, homo sapiens
tgaccaagtcactttctttctgtgatataaattccttgatgagtacaaagaaaaaggtgtcaccattaaactaaactgtgaccaagtcactttctttctttgatataaattccttgatgagta

SEQ ID NO: 8424 - DNA, 85 bp, homo sapiens
tcagcagagagggtagctcctctctgctagacagattgtccccacgagtgttgagctctcagcagagagggtagcacctctctgc

SEQ ID NO: 8425 - DNA, 110 bp, homo sapiens
gcaacaaggaatcgctaatattcattgattgtagcaggtttcgcatgtacatgattttagcatgtacttgtagcaggtttcgcaacaggaatcgctaatattcattgatt

SEQ ID NO: 8426 - DNA, 113 bp, homo sapiens
tgttgcccaggctggagtgcagtggtgtgactgcagttcactgcacctaatttttttttttttgggagatggagttttgctcttgttgcccaggctggagtgcaatggtgtga

SEQ ID NO: 8427 - DNA, 128 bp, homo sapiens
ttgattaatatagttcaaaaaatgaaagtgttgaaaatgagaaaagaacaagttaaattgaaaaatatctatattaatagttgattaatatagttcaaaaaatgaaagtgttgaaaataagaaaagaa

SEQ ID NO: 8428 - DNA, 75 bp, homo sapiens
cactttctctttgaatctcaggatgacttttcctctccttgaggacactcaccactttctctttggatctcagga

SEQ ID NO: 8429 - DNA, 87 bp, homo sapiens
atacatacatgcagacacatctctctctatacatatgtgtgtatatatatatacacatatatagatagatacatgcagacacatctc

SEQ ID NO: 8430 - DNA, 102 bp, homo sapiens
aaaatagatctgtctgtctgtctgtctgtctgtctgtctgtctatctatctatctatctgtctatcatctatctatctatctatctatctatctatctatct

SEQ ID NO: 8431 - DNA, 112 bp, homo sapiens
ttttacagagtgctgattggtccattttacagagtgctgattggtccattttacagagtgctgactggtgccttcacaatcctttagctaggcacagagtgctgattggtgc

SEQ ID NO: 8432 - DNA, 92 bp, homo sapiens
accaatcagtgctctgtgtctagctaaaggtttgtaaatgcaccaatcagcactctgtaaaaacagaccaatcagtactctgtgtctagcta

SEQ ID NO: 8433 - DNA, 79 bp, homo sapiens
aacctcactaaactgtgcaacacactgagggcctgaaacagtacagatgtgtttttaacctcactcaactgtgcaacac

SEQ ID NO: 8434 - DNA, 110 bp, homo sapiens
tttttagcatatatatttgagttttaaactcaaggtagatgctgtttttagcatatatgagttttaaacttggagtagatgcttttttttagcatatatttttgagtttt

SEQ ID NO: 8435 - DNA, 104 bp, homo sapiens
tttattgattattacattaaaataacgttattttaatgggatgtctttttatacagccatatttaggagagacaatacatttatttattattacattaaaataa

SEQ ID NO: 8436 - DNA, 186 bp, homo sapiens
agctagatacagagtgtcaattggtgcactcacaaaccttgagctaaacacagggtgctgattggtgtgtttacaaaccttgagctagatacagagtgccgattggtgtatttacaatccctgagctagacataaaggttctccaagggcccaccagagcagctagatacagagtgtcgattggtg

SEQ ID NO: 8437 - DNA, 84 bp, homo sapiens
ttttttaaagcattaatcaaaatacttaatgttatgctatttctgttttaaagctcttatttttttaaagcattaatcaaaata

SEQ ID NO: 8438 - DNA, 75 bp, homo sapiens
gcccagaatttccctgcctcctgttgctatcattattctgcccagaattctgcccagaatttccctgcctcctgt

SEQ ID NO: 8439 - DNA, 82 bp, homo sapiens
aaaagattgacaatttcttttaagtttgtcttagcaaattatttttaaattaggctaaaaaaagattgacaacttcttttaa

SEQ ID NO: 8440 - DNA, 125 bp, homo sapiens
agaaagaaaagagaatgcctatgtaatgaagcctctgtcaaaaaaaggaaaggaaagaaagaaagaaagaaggaaagaaaagaaaaggaaagaaagaaaagagaatgcctatgtaatgaagcctc

SEQ ID NO: 8441 - DNA, 92 bp, homo sapiens
ctctagctacctacagagtgctgataggtgcgtttttacagagcactgattggtgcattttacaaaactctagctagctacagagtgctgat

SEQ ID NO: 8442 - DNA, 129 bp, homo sapiens
aaaatgacaaaaccctgtctctacaaaaaaaaagaaaaaagaggtaggaggatcgcttgagcccaggagtttaagaccagtctgggcaaaatgacaaaaccctgtctctgcaaaaaaaaagaaaaaaga

SEQ ID NO: 8443 - DNA, 104 bp, homo sapiens
gtagtcccagctactctggaggctgaggaaggagaatggcgtgaacctgggaggcggagcttacaggtgggcacctgtagtcccagctactcgggaggctgagg

SEQ ID NO: 8444 - DNA, 133 bp, homo sapiens
aatgaggtttctcaaaagatctctttagatttcatttcttatacgctcacactttccaataaaaagtttgatagctaagtaattgttttatttcagaatgagatttctcaaaagatctctttagatttcattt

SEQ ID NO: 8445 - DNA, 78 bp, homo sapiens
acttaataaactcctctctctatatatatgtgtgtatatatatatatatacttaataaactcctatatatatatacac

SEQ ID NO: 8446 - DNA, 96 bp, homo sapiens
ttattgcatatatatgcaatataatatattgcatatatacacaaatgcaataatatacatatattattgcatatatatgcaatatattatattgca

SEQ ID NO: 8447 - DNA, 158 bp, homo sapiens
agctagatatagagtgtccacacgaaggttctccaagtacccaccagagtagctagatacagagtgtcgattggtgcattcacaaaccctgagctagacacaggatgctgattggtgtatttacaaactttgagctagatacagagtgccgattggtg

SEQ ID NO: 8448 - DNA, 88 bp, homo sapiens
gattcccccagcttccgacactctgaggaagaaattctccagggcgtttgtcagctcctcacgattcccccagcttccaacactctga

SEQ ID NO: 8449 - DNA, 111 bp, homo sapiens
gaagggaagcagaaagagctctgccctcagaagcctctgcctaggagagacaaacagtcaacaacaaaacagacaggaaggacgaagggaagtagaaagagctctgccctc

SEQ ID NO: 8450 - DNA, 67 bp, homo sapiens
gtggggggcgtggctggaggtggggccgaggaaggactaggagagcgagcaggagctggaggcgggg

SEQ ID NO: 8451 - DNA, 98 bp, homo sapiens
atagtgttgctcttaataatggtagaaaactggaaaatgaaagcaaaaacataatgttcacaatagtgttgctctttataatggtagaaaactggaaa

SEQ ID NO: 8452 - DNA, 78 bp, homo sapiens
gagaaatagaattgttgatattttgtaggaatcttctaaaaggagatataatgagaaatagaattgttgacattttgt

SEQ ID NO: 8453 - DNA, 91 bp, homo sapiens
gagtttgagaccagcctggtcaacacggtgaaaccctgctgaggtgggcagattgcctgagctcaggagtttgagaccagcctgggcaaca

SEQ ID NO: 8454 - DNA, 107 bp, homo sapiens
tcccaatctatatacattttatttccttttcttgtcttattgcattagataggacttaaagacagtttttatttcctcccaatctatatacactttatttccttttc

SEQ ID NO: 8455 - DNA, 109 bp, homo sapiens
aagaattaattcagattaagaatatctaaatatcctaggatcctgagaatatccgaggatcctaagatcaagatcctaaaatcaagaattaattcagagtaagaatatc

SEQ ID NO: 8456 - DNA, 76 bp, homo sapiens; identical to SEQ ID NO: 7321

SEQ ID NO: 8457 - DNA, 108 bp, homo sapiens
cccgggtgctgctgcagctgcccaaaccagggctgcatacccagcctcgctccgtggagcaggcaggagtcctgccccactcccgggtgcagctgcagctgcccaaac

SEQ ID NO: 8458 - DNA, 108 bp, homo sapiens; identical to SEQ ID NO: 8457

SEQ ID NO: 8459 - DNA, 95 bp, homo sapiens
atgataataacaagaaaaatgcttagtaccttaataaagtagtaaataataaaaaatgacaatgataataacaagaaagatgcttagtaccttaa

SEQ ID NO: 8460 - DNA, 117 bp, homo sapiens
gaggctgaggcagaagaatcgcttgaacctgggaggcagatagccgggcatggtggcacgtgcctgtaatcccaactactaaggaggctgaggcagaagaattgcttgaacctggga

SEQ ID NO: 8461 - DNA, 596 bp, homo sapiens
ttggagagaaaccttatgaatagaatgaatgtgacaaggtctctggttatctcatatctttgaaaggcatctgagaaatcacactggagagaaggcttacagatgtagtaactgtggcaaagcctttactgagtgtgcaagccatactaaacatcatgtaatccatctggagagaaaccttacaaatgtagtgactgtgggaaattttgtctactgtagtcatacctccatccatactggagagacaccttacaaatgtaataagtgtgtcagtgcctttagtgagcattcaagcattactaaatatcaggtaatccataagggagagaaaccttacaaatataatgaaagtgataagtccttgtcttggcaaccagacttcaccagacatcagataatccatactgaagagaaaccttacaactgcaatgaatgtggcaagatcttcagtcaaaatttacaccatgcacaacatcagagaacttacacttgagagaaagcttctgaatgcaatgagtttggtaaatccttaatcatttgtttaagcattaatctacctcagagcggccatactaaagagaaaccccataactgta

SEQ ID NO: 8462 - DNA, 120 bp, homo sapiens
ttttttttttttgagacggagtgtcgctgttgtcggcccgggctggagtgcaatggcatgatcgcggtttatctctttttttttttttttttttttttgagacggagtgtcgctgttgtc

SEQ ID NO: 8463 - DNA, 95 bp, homo sapiens
taaaaatacaaaagttagctgagtgtggtgatgggcgcctgtgtaaatatacacaggtggtgggcgcctgtgtaaaaatacaaaaattagctgag

SEQ ID NO: 8464 - DNA, 82 bp, homo sapiens
agctgcatctggtgtcaggctttatagtggtaagtgagttgatgtactttgattgtacagctgcatctggtggcaggcttta

SEQ ID NO: 8465 - DNA, 96 bp, homo sapiens
taatctgtaagtttaaaatacaatactataaaatatggtaaagatacaatacttagaaattaaggtacttaatctgtaagtttaagatacaatact

SEQ ID NO: 8466 - DNA, 162 bp, homo sapiens
agcctatttcctctcagctgttttcaactgtaaaacacaaatatgtctaacattctttaaaattaaaaatgcaaagtgtttatctaaatgaagttccagaagtacctactaagcctatttcctctcagctgttttcaactgtaaaacacaaatatgtctaac

SEQ ID NO: 8467 - DNA, 113 bp, homo sapiens
gaaattgcaaagatagtacaagaagttttcaatctcttgtagttttttaactgtgtatgtggaaataattaaagattcaaatgaaattgcaaagatagtacatgaagttttca

SEQ ID NO: 8468 - DNA, 97 bp, homo sapiens
tcactacagcagttactactgttactacttgagaccctcattacagcagttactgtttctgcctgagaccctcattacagcagttactactgttact

SEQ ID NO: 8469 - DNA, 109 bp, homo sapiens
tctatgtatttgtctcagatttttgacagtcgcttcgtgattttgacatttcacccaggatattgcaacatctgctctctttctatgtatttgtctcggatttttgaca

SEQ ID NO: 8470 - DNA, 127 bp, homo sapiens
ctcaaggattattcaggccccgtcccttccctacacatcaagcccagggatttgcccctgcccaggactggcaaatttgccattctactactcctcaaggattattcaggccccctcccttccctac

SEQ ID NO: 8471 - DNA, 145 bp, homo sapiens
ggggtccctatcctgatgacctcatctaatcctaattacttcccaaaggcctcctccacaccaggcctcctccttttcttataaagccacctgggggccctatcctgatgacctcatctaatcctaattacttcccaaaggcctc

SEQ ID NO: 8472 - DNA, 186 bp, homo sapiens
aaaataacaatgatgaaaatatttttaccatatttatatattatctatattataaaacatgcaagaaaagaaactaaaaatataaaataacaatgatgaaaatacttttaacagtcctcaaataattttgctttctctattttatgattgtgtgtttataaacacacaaatatgcaaatataattg

SEQ ID NO: 8473 - DNA, 101 bp, homo sapiens
tattctattgggttctatttctctatgatatatatatcatatgtgatatagatatagaactctatattctattgggttctatttctctatgatatatgata

SEQ ID NO: 8474 - DNA, 138 bp, homo sapiens
catccagagtatatatcagtgaaatcatttaaaactgaatttggagagatttggataaaaagtgtttgagccaggttagggaataatttttttcatccacagtatatatcagtgaaatcatttaaaactgaatttgga

SEQ ID NO: 8475 - DNA, 92 bp, homo sapiens
tgaaattagcttgagtactaattttattatttgattctattgattttattttttctttgattaaaaaggtgaaattagcttgagtactaagt

SEQ ID NO: 8476 - DNA, 106 bp, homo sapiens
ttgcttaattctcataattgtcatataagcaatttataggaatatgcaattccaggaaatcaaaagacttgcttaattctcatagttgtcatataagcaatttata

SEQ ID NO: 8477 - DNA, 107 bp, homo sapiens
ccctacctcaagtgatccaccctccttggtccacccttctttgggagcaaagagcatgttgaccaggctggtgtcgaacgccctatctcaagtgatccaccctcctt

SEQ ID NO: 8478 - DNA, 97 bp, homo sapiens
attgagtgacgttttcatccataggaaagactataaatacatattctgtttgatcatatttcaaattgagtgatgttttcatccataggaaagacta

SEQ ID NO: 8479 - DNA, 136 bp, homo sapiens
attttccaaatcagggttgttattatttagaattaaagtagttgcatttctactgatacttgaaaaattcaactgttttccaactattttcaactattttccaaatcagggttgttattatctagaattaaagtag

SEQ ID NO: 8480 - DNA, 81 bp, homo sapiens
caagtctctaggaagttccaaactttcccacatcttcctgtcttctgagccctccaagtctccaggaagttccaaactttc

SEQ ID NO: 8481 - DNA, 93 bp, homo sapiens
tttacaaacctttagctagacacagagtgctgattggtgcatttttacagagtgctgattgttgtgtttacaatcctttagctagacacagag

SEQ ID NO: 8482 - DNA, 90 bp, homo sapiens
ttttgtatagtattccttattaattaaatacatttattaattaaataaattactatacattttgcatagtattccttattaattaaatac

SEQ ID NO: 8483 - DNA, 75 bp, homo sapiens
attaaaagccatcaagcccaaactgctattcagtttataagacaatgtgatattaaaagccatcaagcccaaata

SEQ ID NO: 8484 - DNA, 116 bp, homo sapiens
gtctcgctggcttcaggagtgaagctgcaaaccttcgctgtgagtgttaaagcttttaaggtggcgcatcctcccggtaggttcatagtctcgctggcttcaggagtgacgctgca

SEQ ID NO: 8485 - DNA, 77 bp, homo sapiens
ttctcagtaatattacacttaccttcattttaagcctaaaaataatttttattctcagtaatattacacttaccttc

SEQ ID NO: 8486 - DNA, 83 bp, homo sapiens
actacttgatttgcaatgttacaaatggtacaaatttgtatgtatcaagtatattattactacttgatttacaatgttacaaa

SEQ ID NO: 8487 - DNA, 76 bp, homo sapiens
tctaaatgcatgtagaggaaatattttagataattaggttataaacagaaggttctaaatgcatgtagaggaaata

SEQ ID NO: 8488 - DNA, 97 bp, homo sapiens
agggctcttgggtgactaggtgcattgtcaatgaatttggcattagccttcttgtacatgtctacagggctcttgggtgactaggtacattgtcaat

SEQ ID NO: 8489 - DNA, 88 bp, homo sapiens
ggacttgccgctaagggtgaaggagaaggggttgaggggtacttgcccctcccccagaaaagcaggacttgccgcgaagggtgaagga

SEQ ID NO: 8490 - DNA, 105 bp, homo sapiens
tggctgctccacagacatagcaggactgtctcttaggtagagtcacccagagcagcactggtggcagcagttacagcagagtggctgctccacagacagagcagg

SEQ ID NO: 8491 - DNA, 72 bp, homo sapiens
caatgatactcagctagggtggggctggtatgtagggtcctgtgtggtccaatgatactcagctagggtagg

SEQ ID NO: 8492 - DNA, 149 bp, homo sapiens
ttaaaatcaaagaagaaaagaacaacatttttgtatgatttatacttttttaatctggttgttcctccaaattttcttgaacctcttctctgatattcccttaaaatcaaacaagaaaagaacaacatttttgtatgatttatactttt

SEQ ID NO: 8493 - DNA, 101 bp, homo sapiens
gcattatagaatacaatagaatgtacattatagaatacaatagaattgtattatatacaatatatacaatagaattgcattatagaatacaatagaatgta

SEQ ID NO: 8494 - DNA, 192 bp, homo sapiens
agctagctacagagtgctgattggtgtatttacaaaccccctaagctagacacagagtactgattggtgcatttacaaaccttgagctagatacagagtgctgattggtgtattcacaatcccttagctacacataaagattctccaagtccccaccagattagccagacacagagtgctgactggtgcatc

SEQ ID NO: 8495 - DNA, 133 bp, homo sapiens
gtcccccaggttccagtgcagtagtgcaatcattgactcactgcagctttttattttttattttttgagacagggtcttgcccggtcccccaggttccagtgcagtagtgcaatcattgactcactgcagctt

SEQ ID NO: 8496 - DNA, 95 bp, homo sapiens
ttagccaggctggtctccatctcttgatcggctaattttttgtatttttagtagagacggggtttcaccatgttagccaggctggtctccatctc

SEQ ID NO: 8497 - DNA, 78 bp, homo sapiens
tctaggaagttccaaactttcccacatcttcctgtctcctgagccctttaagtctctaggaagttccaaactttccca

SEQ ID NO: 8498 - DNA, 105 bp, homo sapiens
accatgttaggataatttcagaaaagtattccattatgtttgaagacatagagaaatagtcactacttagctattttattaccatgttagtataatttcagaaaa

SEQ ID NO: 8499 - DNA, 111 bp, homo sapiens
tgaggtaggcaggtgtctcatttttgctgcttctgttatttttgctggcatcacagtttatgtttctttctttctttgaggtaggcaggtgtctcatttttgctacttctg

SEQ ID NO: 8500 - DNA, 132 bp, homo sapiens
acctcacccttactccagggacaaggtctaggtcatttaggagagtgtcctccaatttcccttccccagtttattgattttaatctccatccacctcacccttactccagggacaaagtctaggtcatttag

SEQ ID NO: 8501 - DNA, 137 bp, homo sapiens
aaattcagtaaagaatgttaccttattttaagtctaatgtcaagtaatgattctagagctactgcaggactgttttctgagcaaatatactttattataaattcagtaaagaatgttaccttattttaggtctaatg

SEQ ID NO: 8502 - DNA, 109 bp, homo sapiens
aaaaagagcaaaactccgtctcaaaaaaaaaaaaaaaaaaagacaattatagaaaaaaagataataacattaaacaataaaaaagagcaaaactccatctcaaaaaaaa

SEQ ID NO: 8503 - DNA, 111 bp, homo sapiens
acactggcttccctcctggcaaatcaaataggatgtcactatcagtacaaaatacattggactggtattcagtacattacactggcttccctcctggcaaatcaaatagga

SEQ ID NO: 8504 - DNA, 106 bp, homo sapiens
caccaatcagcaccctgtgtctagctcagggattgtaaatacaccaatcggcactctgtatctagctcaaggtttgcaaacaccaatcagcatcctgcgtctagct

SEQ ID NO: 8505 - DNA, 127 bp, homo sapiens
ttttataccaataccatgttggttttttttgttttgtttcttgtttttcgttttgttttgttttgttttaagacagagtctcgctctgttttataccaataccatgttgttttttttgttttgtttt

SEQ ID NO: 8506 - DNA, 125 bp, homo sapiens
gaacataaattgtgaagatttcatggacatttattagttccccaaattaatacttttataatttcttacgcctgtctttactgcagtctctgaacataaattgtgaagatttcatggacatttat

SEQ ID NO: 8507 - DNA, 109 bp, homo sapiens
tggtagctgttataattatttattaaaatacctgttttaattatttattaaaataccattataccattttaataagtggtagttgttataattatttattaaaatacct

SEQ ID NO: 8508 - DNA, 68 bp, homo sapiens
aaacactgataaaataaattgaagaaataaagggcaaagtataaaacactgatgaaacactgataaaa

SEQ ID NO: 8509 - DNA, 125 bp, homo sapiens
ataaatgtccacgaaatcttcacaatttatgttcagagactgcagtaaagacaggcataagaaattataaaagtattaatttggggaactaataaatgtccatgaaatcttcacaatttatgttc

SEQ ID NO: 8510 - DNA, 73 bp, homo sapiens
gccaagtgctttgaaaaatgaactaattggtacaagagcctaggaaatagccaagtgctttgaaaaaatgaac

SEQ ID NO: 8511 - DNA, 134 bp, homo sapiens
tgaaagcagcgacagagtcttaattacttttttatacctatgaggtaataagttgcatttattttctatcagttttactacattgtgaactctttgaaagcagggacagagtcttaattacttttttataccta

SEQ ID NO: 8512 - DNA, 119 bp, homo sapiens
gtcaaattttggttatgaaaagctgaaaggctgtacatgtggataatttcctgtgaccttgctagatctactcagaattatgcttgagtcaaattttggttatgaaaagctgaaaggct

SEQ ID NO: 8513 - DNA, 104 bp, homo sapiens
gcaattacaaccttacacacacacacacacacacacacacacacacacacacacacacttagaggaaagcaactgcctacacacacacacacacacacacacac

SEQ ID NO: 8514 - DNA, 87 bp, homo sapiens
tgggagttgaacaatgagaacacaggaacagaaaaccaaacactgcatgttctcactcttaagtgggagttgaacaatgggaacaca

SEQ ID NO: 8515 - DNA, 81 bp, homo sapiens
gtggctcccacctgtaatcccaacactttaatcccaataaattttatggcctggcatggtggctcacacctgtaatcccaa

SEQ ID NO: 8516 - DNA, 127 bp, homo sapiens
ttaatattgccccaattccttcccattttcttgcctctctggcatatagtctacacttttcttaatgaaatctgcccaaatagttaatattgccccaattccttcccattttctttcctctctggca

SEQ ID NO: 8517 - DNA, 201 bp, homo sapiens
aggatggaagggtagatgagtgtatggataggtaaatggatgaatggatgggcagatggctgtgtggataggtagataattggatgagtggatggatggatgaatggatggatggatgagtggatagatggatggatggatggatggatggatggatggatggatgatgtggggatgggtagatggatggataggtggatg

SEQ ID NO: 8518 - DNA, 95 bp, homo sapiens
caccaatcagtgctctgtgtctagctaaaggtttgtaaacacaccaatcagcactctgtaaaaacgcaccaatcagtgctctgtgtctacctaaa

SEQ ID NO: 8519 - DNA, 81 bp, homo sapiens
agtaaaagagatgaagaaaaaattacatatttcaatgacataaactgatcctaagtaaaagagaggaagaaaaaattacat

SEQ ID NO: 8520 - DNA, 95 bp, homo sapiens
tatttttgcagtgctatgctttgattatgagactgatgtgctgcctactccactaaggagggaccttggtatttttgcagtgctatgtttgattt

SEQ ID NO: 8521 - DNA, 81 bp, homo sapiens
tttagtttgttaaattaagtttaacaacttaaacttaatttagcttaacaaacttaaatttagtttgttaaattaagttta

SEQ ID NO: 8522 - DNA, 86 bp, homo sapiens
ccacaataatcaagacagtggggttttaacgtttcttaactttaaaacatgttataaaaccacaatagtcaagacagtggggtttt

SEQ ID NO: 8523 - DNA, 108 bp, homo sapiens; identical to SEQ ID NO: 435

SEQ ID NO: 8524 - DNA, 122 bp, homo sapiens
gaacataaattgtgaagatttcatggacatttcttagttccccaaattaatacttttataatttcttacacctgtctttactgcaatctctgaacataaattgtgaagatttcatggacatt

SEQ ID NO: 8525 - DNA, 84 bp, homo sapiens
ttcaaagaaaaaagaaaagggagaaaaaagaaagttttttcagagaaaaaagaaagttttttcaaagaaaaaagaaagggagaa

SEQ ID NO: 8526 - DNA, 93 bp, homo sapiens
tcagcactcagcagagaggagaccctggggtgggtagctcctctctgcagctggtcatcctgttgagtgttcagctctcagcagagaggagac

SEQ ID NO: 8527 - DNA, 76 bp, homo sapiens
atccaatttctaacaattccaagttcataagaagggatcatgttttattctcaaccaatttctaacaattccaagt

SEQ ID NO: 8528 - DNA, 79 bp, homo sapiens
ctgaatatatgtgctgactttgagctgctagtgattcctactagggagtcatctgaatatatgtgctgactttgagctg

SEQ ID NO: 8529 - DNA, 106 bp, homo sapiens
tatatatctattatatataatatacatatattacatagatatgtattacatgtatatatacatcatcatatatacatatgtatatataatgtacatatattacata

SEQ ID NO: 8530 - DNA, 90 bp, homo sapiens
gtttagatggtcttagagattatccagagtaacccactcagcccatagaatcccagaggctgtttagatggtcttagagattacccagag

SEQ ID NO: 8531 - DNA, 140 bp, homo sapiens
aactctctgatcatctctttaaatgactataatttttcaatatcatttttatagagagaatacaaagataattcagtctatcttttaccaaactgcaaactctttgatcatctctttaaatgactataatttttcaatat

SEQ ID NO: 8532 - DNA, 104 bp, homo sapiens
cattactgtcaataacagagcaaaaaacaagtcagtccacattggttccaaatggtcattgcatgaattgtcatcattactgtcaacaacagagcaaaaaacaa

SEQ ID NO: 8533 - DNA, 108 bp, homo sapiens
caacaatctgaacattataaaacatgaagatttctcttttacaagagcatagttccccttaactgccctattgccaacaatctgaacattataaaacgtgaagatttc

SEQ ID NO: 8534 - DNA, 81 bp, homo sapiens
catttacatagggtgtacaccaagtgaatgactttgtaactttacttcatcatcttcatttacatagtgtgtacaccaagt

SEQ ID NO: 8535 - DNA, 108 bp, homo sapiens
cgtgtgtaacatgaactgcaaatatatttttcatttatgttatttataggcactctttatataagaaatcgtgtgtaatatgaactgcaaatatatttttcatttatg

SEQ ID NO: 8536 - DNA, 99 bp, homo sapiens
gtgtgttatatgcaatgaatggaggtttatatgaatggagatgatatatattgcatagaaattgtatatatccaggtgagttatatgcaatgaatggag

SEQ ID NO: 8537 - DNA, 114 bp, homo sapiens
aaaaaaaaaaaaaatagagtggcaacatttcaccatttttgtctatgaaaaacaactatatttccaaagcaaaaaaaaaaaaaaaaaaaaatagagtggcaacatttcaacatt

SEQ ID NO: 8538 - DNA, 137 bp, homo sapiens
aggctggaagggagctctggaagccaggctggatggagcctcatgacttccctcagcacacggcagagtgtgatcagggttgtggtgcctaagtgaggctggaagggagctctggaagccaggctggatggagcctc

SEQ ID NO: 8539 - DNA, 119 bp, homo sapiens
taaattatacaagtactttatgcatacattcccatagtgcacaagaattcagatattaataattaaattctcctgagctaaaattattttaaattatacaagtcctttatgcatacatt

SEQ ID NO: 8540 - DNA, 85 bp, homo sapiens
ggtcgggctcagtgctgatttgagtcctcagacccacccagtccctctcccctgccaggcggtcgggctcagtgctgatttgagt

SEQ ID NO: 8541 - DNA, 120 bp, homo sapiens
aatacttttataatttcttatgcctgtctttactgcagtctctgaacataaattgtgaagatttcatggacatttatcacttccccaatcaatacttttataatttcttatgcctgtctt

SEQ ID NO: 8542 - DNA, 123 bp, homo sapiens
cccactctcatctgcttgttatgaagttctgataatcactggtacgcagaaagggagaagtataatatatggttctctcttatcccactctcttctgcttgttatgaagttctgataatcact

SEQ ID NO: 8543 - DNA, 108 bp, homo sapiens
tatatccatacaatggagtatcactcaacaatatccaaatgtctattaatttctgaatggacaaacaaaatgcagtatatccatacaatggagtatcactcagcaata

SEQ ID NO: 8544 - DNA, 92 bp, homo sapiens
tcagacagtgattggcccatggcagactctgggccatattaggggtgccaccatgtacccccatgctcagacagtgcttggcccatggcaga

SEQ ID NO: 8545 - DNA, 83 bp, homo sapiens
tgtaaggttcacctctgcatcagaaaatccgagggatctggcccttttataggcacttgtaaggctcacctctgcatcagaaa

SEQ ID NO: 8546 - DNA, 125 bp, homo sapiens
ataaatgtccatgaaatcttcacaatttatgttcagagattgcagtaaaaacaggcataagaaattataaaagtattaatttggggaagtgataaatgtccatgaaatcttcacaatttatgttc

SEQ ID NO: 8547 - DNA, 120 bp, homo sapiens
cccctgcccaagaacccgcaatggtccctggaccctgctgattgcagtacttgtgctcaccgatgcattagcagaaacagcccctgcccaagaacccgcaacggtccctggaccctgctg

SEQ ID NO: 8548 - DNA, 72 bp, homo sapiens
ttttctgtcccctaccatttcttttctttttcttttcttcattgtttgttttcttgtcccctaccatttctt

SEQ ID NO: 8549 - DNA, 116 bp, homo sapiens
aaaatcaaattccaggtgttttcttatgcaggcacagaaaaacaaaaacaaacattatatgttctcactcatatgtgggaactaaaaaaaatcgaattccaggtgttttcttatgc

SEQ ID NO: 8550 - DNA, 91 bp, homo sapiens
tgtataatgacttcttttcctctgggtagatatatacccaggtgtataatgtataccaggtgtataatgacttcttttcctttgggtagat

SEQ ID NO: 8551 - DNA, 132 bp, homo sapiens
tagggatcctttaggtttttacaaatataagattatttcatctagaaacaattttgggttcgacttgccctttcttttttagttctttatagggatcctttaggtttttacaaatataagatcatttcatct

SEQ ID NO: 8552 - DNA, 91 bp, homo sapiens
gtgcctaaattaacatgaatttaataggttattaaacccagcaaactggtgttaaagtggtgcctaaattaacatgaatttaataggttat

SEQ ID NO: 8553 - DNA, 110 bp, homo sapiens
tgtccaagcactcacacatttcaggggtccctttttcttataagctttttgtgtccaagctcttataagccttatgtgtccaagctctcacacatttcaggggtcccttt

SEQ ID NO: 8554 - DNA, 81 bp, homo sapiens
ttcttaggtttctgttttggttttgcttggggttttaataatccaactattcgttcttaggtttcttgttttggttttgct

SEQ ID NO: 8555 - DNA, 80 bp, homo sapiens
gaaagtctggaacttcctagagacttggagggctcagaagacaggaagacgtgggaaagtttggaacttcctagagactt

SEQ ID NO: 8556 - DNA, 115 bp, homo sapiens
agcaaagatgcaaaatgctaaagaagcaatattttctaacatatctaaatgtggctgctttcaccatgggactagcaaagatgcaaaatgctaaagaagcaatattttctaacat

SEQ ID NO: 8557 - DNA, 92 bp, homo sapiens
agatagacaaccttggacaaggtctaaacccatgctgaaatctcagctgcaacactctccatctctagatagacgaccttggacaaggtcta

SEQ ID NO: 8558 - DNA, 90 bp, homo sapiens
aaactttggcaaaacattcagcatttctaaaccttttggtatgtggcatttttccaacacaacaacacaactttggcaaaacattcagca

SEQ ID NO: 8559 - DNA, 95 bp, homo sapiens
agacagaagctcagtggagtatctgtggtccctgtgattttcagggaagagacagacagaagctgcaagacagaagctcagtggagtatctgtgg

SEQ ID NO: 8560 - DNA, 100 bp, homo sapiens
atacagaggcaacattctataccaagcgtctgtggagtaaagggaatgagagaataatcccatatacagaggcaacattctataccaagcatctgtggag

SEQ ID NO: 8561 - DNA, 105 bp, homo sapiens
gatgtaactttatattccactacatgcctgtgaacatgtcaacagaatgacacagtggtgaatgaatgaaaaatatcacgatgtaacttcatattccactacatg

SEQ ID NO: 8562 - DNA, 94 bp, homo sapiens
taacttcacttcagcctctgattggtcactttctgcaagcaatcaaacgtttgcataggatgtaactttataacttcacttcaacctctgattg

SEQ ID NO: 8563 - DNA, 112 bp, homo sapiens
agtgattatttgggaatgtctgttatctaatacttcagttattgtgtatctattttcacatacctttaaaatggcattggagtgactatttgggaatgtctgttatctaata

SEQ ID NO: 8564 - DNA, 84 bp, homo sapiens
cactgcattgataggtaagatataaatacgaacgtgatctaaagcaaagggtgaccactgcattgacaggtaagatataaatac

SEQ ID NO: 8565 - DNA, 186 bp, homo sapiens
tgtagaagtgataactgaaacttcaaatatgagctggcattcgccagatgaaatagcatcaaagagctctagaaaagagcactgaaacttcagataggaagttcacccaccactctaccaggtgcagtggggtagaaacggttcagtgtagaggtctagaaatgagcactgaaacttcagatagga

SEQ ID NO: 8566 - DNA, 94 bp, homo sapiens
gaggaaactcaaagaaattcaagatagcacagagaagacattcagaactctatcagataaacttaacaaagaggaaactcaaagaaattcaaga

SEQ ID NO: 8567 - DNA, 106 bp, homo sapiens
ttttacagagcactgattggtgcattttacaatcctcttgctcactacagagtgctgattggtgcatttttacagagcactgattggtgtattttacaatcctctt

SEQ ID NO: 8568 - DNA, 107 bp, homo sapiens
ccagcctggacaacatagtgagatcccgtttctacaaataaatttttaaagattagttgggccttgtggtgcacgcttgtagtccagcctggacaaaatagtgagat

SEQ ID NO: 8569 - DNA, 71 bp, homo sapiens
agaatgtcaaatatgacccctaaccaatcaagttaaatgtcaggagaatgtcaaatatgacaactaaccaa

SEQ ID NO: 8570 - DNA, 78 bp, homo sapiens
cttaccaacaggagttgattttaccactgttctatttctatagttgctctgataccttaccaacaggagttaatttta

SEQ ID NO: 8571 - DNA, 114 bp, homo sapiens
taggatgatttcttccttttggttttctgggctgtaaaggatgaataccaaacacactcacgtatccttcccacccggtaggatgatttcttccttttggttttctgggctgta

SEQ ID NO: 8572 - DNA, 164 bp, homo sapiens
tgtaaaatgcaccaatcagcactctggtactagcaaaaggatggtaaaatgcaccaatcagcgctctgtaaaacgcaccaatcagcactctgtaaaatgcaccaatcaatactctgtaaaacgcaccaatcgacgctctgtaaaatgcaccaatcagcaggagt

SEQ ID NO: 8573 - DNA, 86 bp, homo sapiens
tgaaccactagaagtatctgggaagtatctgggaagaggaaggacttgatataactagaagtgaaccactagaagtatctgggaag

SEQ ID NO: 8574 - DNA, 96 bp, homo sapiens
accaaaatggggatgctagtcacacttatgtcctatggttcttggggatgaaatgaaattggggatgaaccaaaatggggatgctagtcacactta

SEQ ID NO: 8575 - DNA, 153 bp, homo sapiens
tcccagtaggggcggccgggcagaggcgcccctcacctcccggacggggcggctggccgggctcggggctgacccccaccacctccctcccggacggggcggctggccgggcagaggggctcctcacttcccagtaggggcggccgggcagag

SEQ ID NO: 8576 - DNA, 107 bp, homo sapiens
tttccttgatcttgggcttctcagcctccagaactgtgagatcacacagaaagaaaatccttcctggacactgtttccttgatcttgggcttctcagcctccagaac

SEQ ID NO: 8577 - DNA, 109 bp, homo sapiens
tgtataccaacaatatacatattatatagtagtagatggcctagtatctgaaaagcattgatggtgtgtgtgtgtatatatatatgtataccatcaatatacatattat

SEQ ID NO: 8578 - DNA, 88 bp, homo sapiens
tttctccatatgtagaataaacatatctacaatgcttctagcatctgcttctagattttttatttctccatatgtagaataaacatat

SEQ ID NO: 8579 - DNA, 98 bp, homo sapiens
attcttaattctgagatatatatatatatagatatatagacatataaacacacatatttaaagttacatatatattcttaattctgagatatatgtat

SEQ ID NO: 8580 - DNA, 94 bp, homo sapiens
agtatttttaaattaagttgtatatatatatagacatatatatgagtattttaagctatatgtgagtatttttaaattaaggtgtatatatata

SEQ ID NO: 8581 - DNA, 93 bp, homo sapiens
gaagactggtcaagaagcaactatggagtcagggaaatattttattaagggaataataaagtgtactgatgaagactggtcaagaagcagcta

SEQ ID NO: 8582 - DNA, 93 bp, homo sapiens
caactctgaaaattatatttcctctcagggctttaaatcaaggacttaaaatggataatataatgttcaactctgaaaactatatttcctctc

SEQ ID NO: 8583 - DNA, 95 bp, homo sapiens
ataaattgatgcaatgctgaaaggtgtggatagtttataagagatataaacatggcagattaaataaattgatgcaattctgaaaggtgtggata

SEQ ID NO: 8584 - DNA, 93 bp, homo sapiens
tactaatacaatatctaatttgtgactaagtacatgtgactaagtacatggttagtattctttactaacacaatatctaatttgtgactaagt

SEQ ID NO: 8585 - DNA, 80 bp, homo sapiens
gtagctctatggaagaaatagttgtataagtagtacttatataatctcatcattgtagctctatggaagaaatagtggta

SEQ ID NO: 8586 - DNA, 107 bp, homo sapiens
ttttccatgtattatcttggtaacaaaggaaataaaaaagtaaggacaattaatctcagttctatttacattttccatgtattatcttggtaacaaatgaaataaaa

SEQ ID NO: 8587 - DNA, 98 bp, homo sapiens
aatgttataatacattattatatttatatacattattatatttacatatttatataaatatgtatctaagtatatatttatatacattattatattta

SEQ ID NO: 8588 - DNA, 91 bp, homo sapiens
ctgagtccttaacatctcctgctgtattaacagagtcagaactcaaactctggtttccatagggtctgagtccttaatatctcctgctgta

SEQ ID NO: 8589 - DNA, 124 bp, homo sapiens
taatacttttataatttcttatgcctgtctttactgcaatctctgaagataaactgtgaagatttcgtggacatttatcagttcccaaataatactcttataatttcttatgcctgtctttact

SEQ ID NO: 8590 - DNA, 78 bp, homo sapiens
tctctaggaagttccaaactttcctacatcttcctgccttctgagccctccaaatctctaggaagttccacactttcc

SEQ ID NO: 8591 - DNA, 108 bp, homo sapiens
tgataaattagacttgatcaatatttaaactaatatttcttcgtttcaaaatatatacactaatgaaaacaagaagaagtgataaattagacttgatcgatatttaaa

SEQ ID NO: 8592 - DNA, 88 bp, homo sapiens
aaaactttccttattaagggagctaatgctaccttaagaaaaaggtaacaaaaactttctaacaaaactttccttattaaggtagcta

SEQ ID NO: 8593 - DNA, 91 bp, homo sapiens
ggtgaatggatatcccaggatgacaggaaactgcacctagcacagaggtaaaggaattcccagaaactggtgaatggatatcccaggatga

SEQ ID NO: 8594 - DNA, 137 bp, homo sapiens
tggcaaaacccagtctctgctaaaaatacaaaaattagccaggagtggtgccttgagcccaggagtttgagaccagcctggccaatctggcaaaacccagtctctgctaaaaatacaaaaattagccaggagtggtg

SEQ ID NO: 8595 - DNA, 79 bp, homo sapiens
atatctgtattatatatgtaatatatattaggatagacgtatataagacagacatatctatattatatatgtaatatat

SEQ ID NO: 8596 - DNA, 87 bp, homo sapiens
tataagaaaaatatttcctataagaaatatattataatcttttgattacaattcattttcttataaggaaaatatttcctataagaa

SEQ ID NO: 8597 - DNA, 106 bp, homo sapiens
ctacacattggtggttatgttgataacacagagaataaatccagtccctgttttttcattttgtttagaagttctcatttgctacacattggtggttatgttgata

SEQ ID NO: 8598 - DNA, 71 bp, homo sapiens
tgctcatcaccatgttaacaacagattcattcgtgagcatcagattcatgctcatcaccatgttaacaaca

SEQ ID NO: 8599 - DNA, 102 bp, homo sapiens
tggagaacctttatgtctagctaacggtttgtaaatacaccaatcagcactctgtatctagctaatctagtggggaagtggagaacctttctgtctagctaa

SEQ ID NO: 8600 - DNA, 148 bp, homo sapiens
tatataattatagtgatccttagattatatacagtgatccttagttatataactatataattatagcgatccttagttatattttatatttagtttatttctaaaattgcatttctaaatttttatatataattatagtgatccttag

SEQ ID NO: 8601 - DNA, 110 bp, homo sapiens
tcaagcacaggaatgaaatcatataggaagaaaagtaaaacatttagataaaacggaaaagaggataaagtatatctcaagcacaggaatgaaatcatataagaagaaaa

SEQ ID NO: 8602 - DNA, 96 bp, homo sapiens
ttttctagtgtacatggaacattgacagacagatataaaacattccatccaacaacaacagaatttacattgttttctagtgtacagggaacattg

SEQ ID NO: 8603 - DNA, 86 bp, homo sapiens
atccaatttctgtacattttataatattcacctaacattaacattttaattcacatactgactatccaatttctgtaaattttata

SEQ ID NO: 8604 - DNA, 149 bp, homo sapiens
ttttctggggaaggggcaagtacctcaaccccttctctccttgtctctaccccttctctggtttcctggggcaggggcaagtaccccaaccccttctccttcacccttagccacaagttccgctttcctggggcaggggcaagtacccc

SEQ ID NO: 8605 - DNA, 91 bp, homo sapiens
gtatacatatgtatatatatgtacatatgtatatcataggagggttagggttggatatgtacatatccatgtacatatgtatattatagga

SEQ ID NO: 8606 - DNA, 94 bp, homo sapiens
ataagcttctgcccaatctaatcttttatcttctgtcttcagcctactttttcctttactttacataagcttctgtccaatctaatcttttatc

SEQ ID NO: 8607 - DNA, 111 bp, homo sapiens
gcatgcagacagcccaccccgagggaagactgaggggagaagggacacaacacccctcccaagtcctggcaggccaacccgcatgcagacagcccaccccgagggaagact

SEQ ID NO: 8608 - DNA, 91 bp, homo sapiens
taatttgtaataataattacaaatcatttttatttatagcttctctcactatatgatgtataatttataataataattacaaatcattttt

SEQ ID NO: 8609 - DNA, 81 bp, homo sapiens
gcagctgccggtcatcagaggggggctgaccatcccatggtgtggacgcctctgcagctgccggtcatcagaggggggctg

SEQ ID NO: 8610 - DNA, 106 bp, homo sapiens
ctccagccctttcataatgtcatgaatccattcatctctggagggtgaaaggacaaagaggaccaaactccctccagccctttcataatgtcatgaatccattcat

SEQ ID NO: 8611 - DNA, 81 bp, homo sapiens
aaaagaaagagttgatggctaattagtgggttcattctttattttcactaaaaataaaaagaaagaggtgatggctaatta

SEQ ID NO: 8612 - DNA, 74 bp, homo sapiens
taccaaagtaacatacatggtgttttgggggagtgtctagaaattcacgttaccaaagtaacatatatggtgtt

SEQ ID NO: 8613 - DNA, 89 bp, homo sapiens
tggcctcctttcccccacgcatgcacctagctgagcagtgggatccgaaggggacgctggcctcctttcccccaagcatgcacctagct

SEQ ID NO: 8614 - DNA, 86 bp, homo sapiens
ctcaaagtgatggtatttggaggtgtgcctttagaagttattaagtcatgaaagcagagccctcaaagtgatggtatttggagatg

SEQ ID NO: 8615 - DNA, 106 bp, homo sapiens
cctcgtgtgctgtgtggtccataagtatcaacgggtatttcctgtgtataggacaccatgcatcatgcctcaccaccgaacctcgtgtgctgtgtagtccataagt

SEQ ID NO: 8616 - DNA, 92 bp, homo sapiens
gtctgcgctcgcaggaccacaagtgatgaactgatgccctccgtgttcccatgctggcagctgctgtctgcgctcgcaggacaacaagtgat

SEQ ID NO: 8617 - DNA, 97 bp, homo sapiens
aactgtctatgggactgctgggtaagcttcaagctttaagacaaaaagggtcaatttctgtgtttatcccaaaaaactgtctatgggactgctgggt

SEQ ID NO: 8618 - DNA, 98 bp, homo sapiens
cccccatgctgcgcgtctgtgggctcttggagggtggggatgagctgggcagccgcacggctcctcctggcagatcccccatgctgcgcgtctgtggg

SEQ ID NO: 8619 - DNA, 186 bp, homo sapiens
caccaatcgacactctgtatctagctgctctggtggggccttggagaacctttatgtctagctcagggattgtaaatacaccaatcggcactctgtatctagctcaaggtttgtaaacacaccaatcagcaccctgtgtttagctcaaggtttgtgaatgcaccaatcgacactctgtatctagct

SEQ ID NO: 8620 - DNA, 125 bp, homo sapiens
tattcctcagtggatcacacttgcttcctttcttcagctggtctcttcagttgtggatgggtaagctccggaagtagctattcctcagtggatcacacttgcttcctttcttcagctggtctctt

SEQ ID NO: 8621 - DNA, 91 bp, homo sapiens
ctaaaatgcaagctcaaaaatttaataagttttaatttttagagcagttttaggtttacaggaaaaaaataaaatgcaagctcaaaaattt

SEQ ID NO: 8622 - DNA, 110 bp, homo sapiens
tattctgctgttgctggatggcatattctatatggcatattctggatggcagagtctatatggatattctcgatggcatattctgctgttgcaggatggcatattctata

SEQ ID NO: 8623 - DNA, 85 bp, homo sapiens
tttataaatgaatgccctgattataaattcatatcctgattatattattcatttttattttttataaatgaatgccctgataata

SEQ ID NO: 8624 - DNA, 119 bp, homo sapiens
ctgagcagacaggccttgtgggtgtagctgccccaagggttcaccttgcttgggatgaaggaaactgcacagaggggcctagaagactctgagcagacaggccttgcgggtgtagctgc

SEQ ID NO: 8625 - DNA, 98 bp, homo sapiens
atgtgtcttaattttgcagtaactatagatttttgaaattcctccacattaaacatgaatagaatgtgtcttaattttgcagtaactataggtttttg

SEQ ID NO: 8626 - DNA, 125 bp, homo sapiens
gcagtcctcctgtggccttggcaaactctctggctctctgcaggctggacggaggggcccctcacctcctgggcattgcagtcctcctgtggccttggcaaactctctggctctctgcaggctgg

SEQ ID NO: 8627 - DNA, 101 bp, homo sapiens
gcctggaaggaacagggggcgatggcgtgcttaagggataagaagaaggcagaaattccggggctcggggcccactgcctggaaggaacaggggacgatgg

SEQ ID NO: 8628 - DNA, 99 bp, homo sapiens
tgtccagggcccccagcttgctggacatatgtcctctgatgcactgggggtacattgttgaccatgatggtgtgtccagggcccccagtttgctggaca

SEQ ID NO: 8629 - DNA, 104 bp, homo sapiens
gcaggtaatctttgagctgggctaagaaatgaaggttatcaataaccaccaggttcttgatagcaaatgcaggtaatctttgagctgggctaagaaatgaaggt

SEQ ID NO: 8630 - DNA, 88 bp, homo sapiens
tgcaaatgcctacccaaatctatttctccccaaatctattgctattgttagcttaggcattttgtgcaaatgcctccccaaatctatt

SEQ ID NO: 8631 - DNA, 129 bp, homo sapiens
tttcctcacccaggcttgccacaaactccataccagagtcccccatgctgcaggtgcatggccttgttccaatgcctgggtacctgcatttcctcacccaggcttgccacaaactccataccagagtcc

SEQ ID NO: 8632 - DNA, 124 bp, homo sapiens
aggaaaatcagcctggaatactcaccctgaaggttatgggcaggccgtacaccccaggaagattcaaagatcctccctgaggaaaatcagcctggaatactcaccctgaaggttatgggcaggc

SEQ ID NO: 8633 - DNA, 92 bp, homo sapiens
agtgtgggccgcggggagctttgttcaaaacagttcacagccatctactcagagggggaaacacaccagtgtgggccacggggagctttgtt

SEQ ID NO: 8634 - DNA, 130 bp, homo sapiens
acacagaaggtgcgggttccccaccagggctgctgaggcatgtccgttggagactggcccaacgctgcattccctgagatcaaaacttggacacagatggtgcgggttccccaccagggctgctgaggca

SEQ ID NO: 8635 - DNA, 104 bp, homo sapiens
caggactttagcacgagtgaaagatcgtttaagaatcatctgagaacagggtggaggaggccgtgagccgaggatggccaggactttagcacgagtgaaagatc

SEQ ID NO: 8636 - DNA, 97 bp, homo sapiens
agatcaggcatgagccaggtgaaagagctcctcacaggacctggacgaagcctcacccggaaccgtgtagatcaggcatgagccaggtgaaagagct

SEQ ID NO: 8637 - DNA, 106 bp, homo sapiens
atgagcccataaagggaggcggacactaaggcgggacggaagcgcgtcatcaccgaggctctcacagctcccaggaccttatgagcccataaagggaagcggacac

SEQ ID NO: 8638 - DNA, 96 bp, homo sapiens
ggtgtggtggcacgcacctgtaatctcagctccccgtctctactaaaaatacaaaaaattagccgggtgtggtggcatgcacctgtaatctcagct

SEQ ID NO: 8639 - DNA, 99 bp, homo sapiens
ctaaggatcctctgagccgtcagtggattattaaaacaaatactttattgctaaaaaaaaaaaaaaaaatgctaaggatcctctgagccatcagtggat

SEQ ID NO: 8640 - DNA, 78 bp, homo sapiens
agagtgggttaacttaaaatgtacgtctcctgacatctatgtagttctggattgcagagtgggttaatttaaaatgta

SEQ ID NO: 8641 - DNA, 98 bp, homo sapiens
tgcatgtgggctccagcccagcacttgtttctgtgccttcccgggaggttctaactgttctccttcctcagtgcacgtgggctccagcccagcacttg

SEQ ID NO: 8642 - DNA, 92 bp, homo sapiens
tcctcaccaaggtgaccaccatcttatctagtgaagtagaattctcccagctcccgggagtgtcccttcctcaccaaggtgaccaccgtctt

SEQ ID NO: 8643 - DNA, 115 bp, homo sapiens
gtgacagttcccagcgctgcacggcactgctccccggacttgcagaggccacccttcaaaagtgtacacagcccaccctgggaggtgacagttcccagcgctgcatggcactgct

SEQ ID NO: 8644 - DNA, 83 bp, homo sapiens
gagggaacactgaacagttccataggggcccccgcctctcctggctaacgtgagtgaatagagggaacactgaacagttcctt

SEQ ID NO: 8645 - DNA, 101 bp, homo sapiens
ttagcagtcatcctgaattttactgtattttgtgggtacaggccactccccacagctcggaggggacagttagcggtcatcctgaattttactgtattttg

SEQ ID NO: 8646 - DNA, 108 bp, homo sapiens
ggtagtgtgtcccatggagcccgcagccctggttgtgtgtgtgtgtgtgtgtgtgtgtgtgtgtgtgtgtgaacttgaggtagtgtgtcccatgaagcccgcagccct

SEQ ID NO: 8647 - DNA, 92 bp, homo sapiens
tctcgatggggacagcgggagagggagcccagaccccaacaagctccatggaaatgcgaggagccatcttgatggggacagcgggagaggga

SEQ ID NO: 8648 - DNA, 79 bp, homo sapiens
tcttgctggcggggtcttgggtcactggcacggacgcccctcccaggcctgcgctcttgctggcggggtcttgggtcac

SEQ ID NO: 8649 - DNA, 90 bp, homo sapiens
gatccggaagtggaccccgtgtgccacgtggggacgtggagccaggcgttccggggtgcattcggatccggaagtggaccccgtgtgcca

SEQ ID NO: 8650 - DNA, 111 bp, homo sapiens
attcgatgtcagcccgccacctgacgttgtgtatctgtcatcctctctgcctcatctctgtcagacggcactgattcgatgtcagcccgccacctgacgttgtgtatctgt

SEQ ID NO: 8651 - DNA, 107 bp, homo sapiens
agcctcgagtgcatgtgtgttacatgcgtgctgtgtgtgcgtgcaggtgtatcacattaccgtgctatagtttgtgtgtgagcctcgagtgcatgtgtgttatatgc

SEQ ID NO: 8652 - DNA, 90 bp, homo sapiens
tgagttgcacggattgccgatgtgtgtgcacctgtgtgtgtgattatgagtgtggcagtgagcgtatgagttgcacagattgccgatgtg

SEQ ID NO: 8653 - DNA, 110 bp, homo sapiens
ctgtttgagtccctgttttcacttcctccccaccttttggctaatggggctgatgcggctctgaatgtcagcacatgtatcctgtttgagttcctgttttcacttcctcc

SEQ ID NO: 8654 - DNA, 109 bp, homo sapiens
acagccgaagcccctccctctgtctaatcacatgcatggatacatggatatataaataaatatcaactttactcatacagccgaagcccctccctctctctaatcacat

SEQ ID NO: 8655 - DNA, 77 bp, homo sapiens
ctctctcttccctcaccctcactaatggcctaaataaacaatatgagagggcctctctcttccctcaccctcactaa

SEQ ID NO: 8656 - DNA, 117 bp, homo sapiens
ggacaggcctggagggcgcagctcagatgcacccgttggcaaatggacaggcctggagggcgcagctcagatgcacccgttggcaaatggacaggcctggaggacccagctcagatg

SEQ ID NO: 8657 - DNA, 139 bp, homo sapiens
ccacagactgcgcctcccacctaaggccccgcccactgaggccccatcccctgcccacagactgcgcctcccacctaaggcccttctccaccaaagacctgcctcacacccccaggggcctgcctcccatctaaggccc

SEQ ID NO: 8658 - DNA, 116 bp, homo sapiens
gctgctcatctcctgaggagtggagtggggcctcctcaacagtgagaccctcaagggacagagctccacacacgcagggaccccagctgctcatctcctgaggagtggagtggggc

SEQ ID NO: 8659 - DNA, 300 bp, homo sapiens
gtgcacggtgatcccacgagccctgtgcctgcatccgcccagtctcacccagtaccctcgctcacccaggatgcatggcgcttccacgagccccttgcccacctaggccctcgccgtgctcacccacaatgcacggtgttcccacgagccccgagcccacctgggatgcccggcgttcccacgagcccctcgcccacccgggatgcacggtgttcccacgagcccctcgcccacccgggatgcccggtgttcccacgagccccgagcccacccaggatgcatggcgttcccacgagcccc

SEQ ID NO: 8660 - DNA, 181 bp, homo sapiens
catgtccacctgtgccagcagcagggatggtaatggctctactatctcctgtcctcacctgtgccagcagcagggatggtaacggctttactgcctcccgtcctcacctgtgccagtggctgggatgtcttcacctgtgccagcagcagggatgtcctcacctgtgccagcggcagggatg

SEQ ID NO: 8661 - DNA, 387 bp, homo sapiens
gggacgggggctcgtcgggggcgcggcctggggacgtggagcatcagatggggcggggacacgctgggggcggtacctagagcggggatttggagcggggacagaggagacgagcgccgggaccgggcagggccacactgggggcggttacagtaccgtttagcgtgggggcggggctacggtgctggggttgtggggccaggggggtcgggcgcagggatggggcggggccacgctggggcggggacaaaggagacagcgcagggatggggcgggggcactctgggggcgggacaggaggcgagcgtagggacggggcgtggccacgctgggggcggggacagtggggaccagtgctgggatggggcgtggccacgcttgggggcg

SEQ ID NO: 8662 - DNA, 212 bp, homo sapiens
ggggcggggccaagcttggggcggggtccgtggagtcaagcgccgggatgggttggggccatgctgtgggggggacggggaagtcgaggtttagagagggcagaaccacgctgggggcggagataggggagacacatgctgggatggggcagggcctttttggggtcggtagctattgcagggatttgggagctgggctatggtgggggctg

SEQ ID NO: 8663 - DNA, 197 bp, homo sapiens
ggtaactgggaacatactatagagcccgccagtgaggcaatgtgacattgggagcctggtagaactgggaacatggtctagaacccaccagcaagacagggtaagattgtgagatagaactgggaacctggtctagagcccaccaggtggagagagaggcttagacctgaacctgggccctgagaacatgatctaga

SEQ ID NO: 8664 - DNA, 824 bp, homo sapiens
agaactcactctggagagatgccctatgaatgcagtgactgtgggaaagccttcatttttcagtcttcccttaagaaacacatgagatctcatactggagagaagccttatgagtgtgatcactgtggaaaatcctttagccagagctctcatctgaatgtgcacaaaagaactcacactggagagaaaccctatgactgtaaggaatgtgggaaggctttcactgttccttcatcccttcagaaacatgtgagaacccacactggagagaaaccctatgaatgcagtgactgtggaaaagccttcatcgatcagtcatcccttaagaaacacacacgctctcacactggagagaagccttatgagtgtaaccagtgtggaaagtccttcagcacaggctcttaccttattgtgcacaagagaactcacactggtgagaaaacctatgagtgtaaagaatgtgggaaggcctttaggaattcctcttgcctgagggtacacgtgagaactcacactggagagaagccttataaatgtattcagtgtgaaaaagcctttagcacaagcactaaccttataatgcacaagcgaatccacaatggccagaaactccatgaatgaaatgactcagggaagtgtttgttgcccctcatgcctcctttctcactttagaacatatattggagagaagccctgttagaacataaattgtgaagatttcatggacatttattagttccccaaattaatacttctataatttcttaggcctgtcattactgcaatctctgaacataaattgtgaagatttcatggacacttat

SEQ ID NO: 8665 - DNA, 81 bp, homo sapiens; identical to SEQ ID NO: 4

SEQ ID NO: 8666 - DNA, 92 bp, homo sapiens
agacataggtgtaaacaatgccgggggcactgcagagggtaaatacagggtctgtggaatacacagacttaggtgtaaacaatgccgggggc

SEQ ID NO: 8667 - DNA, 139 bp, homo sapiens
cagccaccattgctccctgtcacagatgggaacaccaagacagccaccattgctccctgtcacagatgggaacactgaggcgagtcctcgagcagccctgaaggtgcagccaccattgctccctgtcacagatgggaac

SEQ ID NO: 8668 - DNA, 80 bp, homo sapiens
agctaatttttttgtatttttagtagctaattacaggcacactccaccatgtccagctaatttttttgtatttttagtag

SEQ ID NO: 8669 - DNA, 95 bp, homo sapiens
cctccccacagtacaagcaggtgcccctgtgcccgctgcaggccgggggcggtgtctgacccagcctcgcctcctccccacagtacaagcaggtg

SEQ ID NO: 8670 - DNA, 97 bp, homo sapiens
aaaaaaaaaaaaaaaattagctgggcgtggtggctcatgcctgtgctccctccactaaaaatacaaaaaaaaaaaaaaattagctgggcgtggtggc

SEQ ID NO: 8671 - DNA, 84 bp, homo sapiens
gccccaccgtgacgggcgtcaccagcgtcatcagcgccttggctgagcccctccgacctgccccaccgtgacgggcgtcaccag

SEQ ID NO: 8672 - DNA, 123 bp, homo sapiens
agctctggccctctgcctgtttttgtaaataaagttttattgggtgcctagtgcaggggtcagtacactacggccctgggataagctctggcccactgcctgtttttgtaaataaagttttat

SEQ ID NO: 8673 - DNA, 120 bp, homo sapiens
tcagggcccagctctagctgaactcccccggggggaggggggaggggggaggctcaggacccagctctaggggggattgaggaggatcagggcccagctctagctgaactcccctggggg

SEQ ID NO: 8674 - DNA, 79 bp, homo sapiens
agccctgggagaaggaatggcagcagccctcttcacctgcctggtgactcactacaagccctgggggaaggaatggcag

SEQ ID NO: 8675 - DNA, 81 bp, homo sapiens
gcgcgcaccgcagccaccgggcacccgggaagcgggcggcgtttggggggaggtaggcgcgcaccgcagccacccggcacc

SEQ ID NO: 8676 - DNA, 110 bp, homo sapiens
cctggcatttcctaaagccacccaggcatggatgagggaccggggggctccatgctggctcagagctgggagatcctggcatttcctaaagccacccaggcatgggtgag

SEQ ID NO: 8677 - DNA, 106 bp, homo sapiens
gggcggcagctgcagagggggctgtgctctctggcctgttgtgccccacccttgtgacaggcaggtgggcgtggccaactgggcggcagctgcagagggggcagtg

SEQ ID NO: 8678 - DNA, 117 bp, homo sapiens
attccgacgccccagtcagtcctgcgtgattgtggcgagggcgcgtctggcaccgggaaggtgtagatcatctagaatgacggcgattccgacgccccggtcagtcctgcgtgattg

SEQ ID NO: 8679 - DNA, 103 bp, homo sapiens
taaccctggatcagccaatcagagttattccctgggacttaactcgggaccacccaatcagagtccttccctgggacttaaccctggctcagccaatcagagt

SEQ ID NO: 8680 - DNA, 79 bp, homo sapiens
tctctactaaaaatacaaaaattaggccaccctggccaacatggtgaaaccccatctctactaaaaatacaaaaattag

SEQ ID NO: 8681 - DNA, 98 bp, homo sapiens
cactgctgcgatggtgaagggataaggttgtgttcacgcgtcgaagtttgtgtccactgcacacgcggctcactgctgcgatggtggagggataaggt

SEQ ID NO: 8682 - DNA, 90 bp, homo sapiens
gaccagccctggtccccggctcaggactggaggggttgccctggtccctggctcaggactggagagaccagccctggtcccgggctcagg

SEQ ID NO: 8683 - DNA, 105 bp, homo sapiens
gaacttggcccagggacctgcagtatgtctgtggctgtgtgccaataaaactttatttatacaaacagggagtggaggggggaacttggcccagggagctgcagt

SEQ ID NO: 8684 - DNA, 93 bp, homo sapiens
gtctgctggagacagacaggactgaactcaggggagcctcccacccctgggaagccggtgtctgctggagacggacaggactgaactcagggg

SEQ ID NO: 8685 - DNA, 76 bp, homo sapiens
ggtgtccacacagaccggagggggtgtcagggagagaggaaaacaccggcctggtgtccacacagacccgaggggg

SEQ ID NO: 8686 - DNA, 134 bp, homo sapiens
tgaggtcaggagttcgagaccagcctggccaacatggtgaagccccatgtctaccaaaaaatacaaaaattagggaggccgagatgggcggatcacctgaggtcaggagttcgagaccagcctgaccaacatgg

SEQ ID NO: 8687 - DNA, 124 bp, homo sapiens
accttcatttatctccagtcctttcgaagacatgaaaggattcacactggagagaaaccctacgaatgcaaacagtgtgggaagaccttcatttatccccagtcctttcgaagacatgaaagga

SEQ ID NO: 8688 - DNA, 118 bp, homo sapiens
gatctcggctcactgcaacctccgcctcccagtttcaagcgattctcttgcctcagcctctcaagtagctgggattacagatctcggctcactgcaacctccgcctcccaggttcaag

SEQ ID NO: 8689 - DNA, 94 bp, homo sapiens
tctgattggccagccctgggtcacatgacatccttgagacaaattttatggctcgagtagaatgctctgattggccagccttgggtcacatgac

SEQ ID NO: 8690 - DNA, 119 bp, homo sapiens
ctacactgtccctgggcaggtgtgggccccctttctctccccaagaacccacccagggaatgcatgttggcggctccctacactgtccctgggcagatgtgggccccctttctctcccc

SEQ ID NO: 8691 - DNA, 92 bp, homo sapiens
gtggctgctgtgggcagaggtcatggggctacgggagtagggtgggggtgacggagagatgactgtggctgctgtgggcggaggtcatgggg

SEQ ID NO: 8692 - DNA, 103 bp, homo sapiens
gcaactttgcaggggttgggacctgtgagggctgttagccagcccaccccctggctctgtcaccgccatccagcaactttgcaggggtcgggacctgtgaggg

SEQ ID NO: 8693 - DNA, 114 bp, homo sapiens
tggggctcaggatctgcatagattccctgttcatctgcagatcagtcccggggggccccacacccacagctctcgtggggctcaggatctgcgtagattccctgttcatctgca

SEQ ID NO: 8694 - DNA, 76 bp, homo sapiens
ggccgagccctcaccacgcagtcccacctgccaccctccctccccggccggggccgagccctcaccaggcagtccc

SEQ ID NO: 8695 - DNA, 95 bp, homo sapiens
agtggggcaggggcagggatgcagctgacctttccagggcatcacagagacagatcagccgtgggagtggggcaggggcagggatggagctgacc

SEQ ID NO: 8696 - DNA, 108 bp, homo sapiens
ggaaagcacgggcctcccccaccctcacccccacgctccccaaacctcaccctcacgctccccgcaacctcacccccacgctcccccaacctcacccccacgctcccc

SEQ ID NO: 8697 - DNA, 88 bp, homo sapiens
cagaatggtgcatactggcacacacagcaggcacttaataaatacttagaaatgaatgactggtcagaatggtgcatgctggcacaca

SEQ ID NO: 8698 - DNA, 112 bp, homo sapiens
ggctaattttgtatttttagtagagacaagatttcttcatgttggtctggttggtcttgaactctcgacctgcaccaccgcacctggctaattttgcatttttagtagagac

SEQ ID NO: 8699 - DNA, 112 bp, homo sapiens
gatctcggctcactgcaacctctgcctcccaggttcaagcaattctcctgcctcaggcccaggctagagtacagtggcgtgatctgggctcactgcaacctctgcctcccag

SEQ ID NO: 8700 - DNA, 140 bp, homo sapiens
tgggcacccctcccctgcaccccaacttccagggagaccgaggcggggagcgccatcccccgggtgaccccagcatctccgtcttccctctgtatgtgggcacccctcccctgcaccccaacttccagggagactgaggc

SEQ ID NO: 8701 - DNA, 141 bp, homo sapiens
caaggggctggccagggcagggcagagcctgctaggaggagggagagggctgggagcagccagggtggacccctcaacctggatcagatcacaaggggctggccagggcagggcagagcctgctaggaggagggagagggc

SEQ ID NO: 8702 - DNA, 103 bp, homo sapiens
aagttctggagggcagagccatgtattggacagagcctcactctaggatggcgaaggggcagtgagagccttaagttctggggggcagagccatgtattggac

SEQ ID NO: 8703 - DNA, 118 bp, homo sapiens
cctcggcctcccaaagtgctgggattacaggcgtgaaccaccacacccggcccttgaactcttaacctcaggtgatccgcccacctcggcctcccaaagtgctgggattacaggcgtg

SEQ ID NO: 8704 - DNA, 94 bp, homo sapiens
gtgccaagaaactctgatacataacagaaggcatatgtatatgtattagagatgggtttcaccatgtgccaagaaactctgatatataacagaa

SEQ ID NO: 8705 - DNA, 152 bp, homo sapiens
gggaggctgaggaaggagaatcacttgaacctgggaggcggaggttgctgtgagcagattagctgtgtgtggtggcatgcacctgtaatcccggctactagggaggctgaggaaggagaatcacttgaacctgggaggcagaggttgctgtg

SEQ ID NO: 8706 - DNA, 109 bp, homo sapiens
cactggctgttccctctgcctgaaatgcttttttctcagagcctttgcactaacctcagggcttcttgtactaacctcactggctattccctctgcctgaaatgctttt

SEQ ID NO: 8707 - DNA, 83 bp, homo sapiens
cccacattgctaatcccagggtgccattagcaatggcacccacaatcccattggattacccacattgctaatcccagggtgcc

SEQ ID NO: 8708 - DNA, 129 bp, homo sapiens
ctgttcataagagaatccacaatggggagaaaccctatgaatgcaatgactgtgggaaaaccttcagcagcagatcttaccttactgttcataagagaatccacaatggggagaaaccctacgaatgca

SEQ ID NO: 8709 - DNA, 129 bp, homo sapiens
gtgctttcctccctggcctgggacatttaccgaccccctcccaccctatcccagcccaggaggtctatggtatctctaaccagcggtgctttcctccctggcctgggacatttaccgaccccctcccac

SEQ ID NO: 8710 - DNA, 108 bp, homo sapiens; identical to SEQ ID NO: 435

SEQ ID NO: 8711 - DNA, 195 bp, homo sapiens
tgtctagctaaaggattgtaaacgtaccaatcagcactctgtgtctagctaaaggattgtaaatgcaccaatcagcactctgtgtctagctaaaggtttgtaaatgcaccaatcagcgctctgtgtctagctaatcaggtaggggacttggagaattttctgtctagctaaaggattgtaaatgcaccaatcagc

SEQ ID NO: 8712 - DNA, 116 bp, homo sapiens
gagaatgtgttggtaagggccactaaatccaatttttctcggtcatctttgtggtctaggaggacaggcaagggtgcaggttttttgagaatgcgttggtaagggccactaaatcc

SEQ ID NO: 8713 - DNA, 155 bp, homo sapiens
tgtctagctaaaggattgcaaatgcaccaatcagcgctctgtgtctagctaaaggtttgtaaatgcaccaatcagcgctctgtgtctaactaatcgcgtaggggacttagagaactttcctgtctagctaaaggattgtaaatgcaccaatcagc

SEQ ID NO: 8714 - DNA, 205 bp, homo sapiens
gccgggtaatgatgtacctgtgatggaacagattgatctaggctgggggatagatacctgtgggcaggtgtgcctgggctaggtgaggatatacctgtgatggaacagatggatctaggctgggggatagatacctatggacaggtgtgtctgtgccaggtgagggtatacctgtgatggaacagatggatctaggctgggggat

SEQ ID NO: 8715 - DNA, 86 bp, homo sapiens
aaaagtggaaaaataaaatactacataaatatgagtgcttcttcctcaaaataatagaagaaaagtggaaaaagtaaaatactaca

SEQ ID NO: 8716 - DNA, 104 bp, homo sapiens
cgagattttccggtgaatacgggattgcacttactctttcatcacggaaacagaccccccgagagaagccccaacgagattttccggtgaatacgggactgcac

SEQ ID NO: 8717 - DNA, 113 bp, homo sapiens
agcattcacattggagagaaaactcttgaatttactgattgtagaaaagctttcaatcaagagtcatccctcaggaaacacttaagaactcccacaggacagaagtttcagga

SEQ ID NO: 8718 - DNA, 863 bp, homo sapiens
cctatgaatgtaaacaatctggaaaaccctttggatgcgcctcagaacttcaaatgcatgcaaggactcagtgtggagaaaccttacaaatgtaagaaatgtgaaaaagcatttaataacttatcttcctttcaaatacatgaaagaatgcacagaggagggaagtatcatgcctgtaagggttctgggaatacataccgtttttctggtttctatcatagacataaaatgcctcatgctggcgggaagttttatggatgtaagaaatgtgggaaagcctttattagtttctgtgcctttcgataccatcaaaggactcacactaaagagaaaccctatgcgtgtaaacaatgtgggaaagcctatatttcttacacttcttttcaatatcatcagttgaatcacactggagcgaaatgctatgagtgtaagcagtgtggcaaaggcttcgatttgcccaattccattcgatatcatgaaatgactcacactggggagaaaccccatgaatgtaagcaatgtgggaaaactttcagatgtgcctcaagcctccgaatacatggaaggactcacactggggagaaaccctatgaatgtaaacagtgtggtaaagtctctcgttattggagcggccttcaggtacatgaagtaactcatattggaaaaaagctttatgaatgtaaggaatgtgggaaatcatactatagttctggttcctttctaaatcataaaaggatccacaccagggagaagtcttatgaatgcaaggaatgtgggaaagcatttggtaatcccatatcctttcaaaaacatgaagggagtcacagaaaatggaagccttatgaatgtaaggaatgtgggaa

SEQ ID NO: 8719 - DNA, 613 bp, homo sapiens
gctataaatgcaagcaatgtggaaaacccttcatttatttcaatgcctttcaacgtcatcaaaggagccacactggagagaacccctatgagtgtaagcaatgtgggaaagcctgtatttcttccactgcttttcagtgtcgtgaattgagtcacactggagcaaaacgctataagtgtaagcagtgtggcaaaggcttcaatttgcccagttccattcgatatcatgaaatgactcacactggagagaaaccctatgaatgtaagcaatgtgggagagctttcagatctgcctcacacctacgaacacatgaaaggactcacattggggagaaaccctatgaatgtaaacagtgtggtaaagtctatcgttactggagtggccttcgaatacatggactaactcatattggaaaaaagccttatgaatttaatgaccgtgggaaatcattctatagttccaatttctttctaaatcataaaagggtccacactagagtgaagacatatgaatgcaaggaatgtgggaaagcatttgataatcctacatcctttcaaaaacatgaagggagtcacagaaaagggaagtcttatgaatgtaaggaatgtgggaa

SEQ ID NO: 8720 - DNA, 635 bp, homo sapiens
aacgttttcccacactgcttgcattcatagggtttctctccagtgtgaattcgttcatgatatcgaactaaactgggacgatcaaagcctttcccacatatcttacatttatgaggtcgatctccagtgtgccttttcatgtgtatctgaaagcttccaagatgatgaaatgttttcccgcattgcttacactcatagggtttctctgcactgtgagtggtttcatgtcttcgaagggaactggaaacactgaaggctttcccacactgtttacatgtatatggtttctctccagtgtgagttctttcatgtcttatataggaactggaatcaggcaaggctttagaacactgcttacattcatacggtttctccccagtgtgcattctctcatgtcttcgataggaactgtaaaaaggaaaggctttagaacactgcttacattcatacggtttctctccagtgtgagttctttcatgcatacgtaataaactgggccaaaaaaaagctttcccacacaacttacatttataaggtctatttccaccttgcactaccatgtgtcttcgaaggtttctacgagaactgaaggtttttccacattccttacactcatagcgtttctttccagtgtg

SEQ ID NO: 8721 - DNA, 148 bp, homo sapiens
tctgagctggaccccaacactggctggaacgacccccattctgagctggaccccaacactgggatggctcatcctacagtctgagctgaaccccaacactgggatggaccactccaccacccctctctgagctggccccctgccgggt

SEQ ID NO: 8722 - DNA, 111 bp, homo sapiens
agtgctggaattacaggtgtgagccaccaagcccagcctcaaactcctgagtttaagtgatcctcacacctcagcctccctgagtgctgggattacaggtgtgagccacca

SEQ ID NO: 8723 - DNA, 104 bp, homo sapiens
ccaggccaccctcaccaccatgggaatgaggcggcaggtgaccatgccagtgtccccacacagccaccacccactccgcgccaggccacactcaccaccatggg

SEQ ID NO: 8724 - DNA, 93 bp, homo sapiens
tttttgtatttttagtagagatggggtttcactatgttggcaaggctggtcttgaactcctggccaatttttgtattttttgtagagatgggg

SEQ ID NO: 8725 - DNA, 86 bp, homo sapiens
tggctcatgcctgtaatcccagcatttttatttttttaagacggagtctcggccgggcgtggtggctcaagcctgtaatcccagca

SEQ ID NO: 8726 - DNA, 110 bp, homo sapiens
tgggaggtggaggttgcagtgagctgagattgtaatcccagctcctcaggtggctgatgcaggaggatcacttgaacctgggaggtggaggctgcagtgagctgagattg

SEQ ID NO: 8727 - DNA, 78 bp, homo sapiens
agtcttaattagggaaaaggctaaggggaacaggggaaaaggctgttaaattaaagtcttaattagggaaaggctaaa

SEQ ID NO: 8728 - DNA, 124 bp, homo sapiens
tgaagatttcatggacatttatcagttcccaaaattaatacttttataatttcttacggctgtcttcactgcaatgtctgaacataaattgtgaagatttcgtggacatttatcagttcccaaa

SEQ ID NO: 8729 - DNA, 96 bp, homo sapiens
aacttcttttattttattttaataaaaatatgaaaaagatgttttcttcctaacatgaacagtcctactgcagaacttcttttattttattttatt

SEQ ID NO: 8730 - DNA, 88 bp, homo sapiens
cacttgggaaaactgttaggcagtttcttttccttccttccttccttccttccatcccaaacacttgggaaaactgttgggcagtttc

SEQ ID NO: 8731 - DNA, 139 bp, homo sapiens
tatttttagagacagagtcttgctctatcactcaggctggagtgcagtggtattatcacagctcactgcagcctcaaacctttttttttatttttagagacagagtcttgctctatcactgaggctggagtgcagtggt

SEQ ID NO: 8732 - DNA, 228 bp, homo sapiens
ttgtaaatataccaatcagcactctgtctagctcaaggcttgtaaatgcaccaattagcactctgtgtctagctcaagatttgtaaatacaccaatcagcactctgtgtctagctcaaggtttgcactctgtatctagctaatatggtggggacttggagaacctttagtgtctagctaagggattgtaaatacaccaatcagcactctctgtctagctcaaggtttg

SEQ ID NO: 8733 - DNA, 79 bp, homo sapiens
tctctactaaaaatacaaaaattagccaggtatggtggtgcatgcaaacctcatctctactaaaaacacaaaaattagc

SEQ ID NO: 8734 - DNA, 87 bp, homo sapiens
agcactttgggaggccaaggtgggcagattgtctggtggctcacatctgtaatcctagcactttgggaggccaaggtgggcagattg

SEQ ID NO: 8735 - DNA, 139 bp, homo sapiens
ctgcttttttttgcaaccaacacttcaggctcaggcacagcatcggtgcgggggctgaggacagtgtttgctgaggcctgaagttggcactgcctcctgcttttttttgcaaccaacacttcaggctcaggcagagcat

SEQ ID NO: 8736 - DNA, 87 bp, homo sapiens
ttgtactttaaccaagatatttgtactagacatgctcacaggcacatagtacattctacgtccttgtactttaaccaagatatctgt

SEQ ID NO: 8737 - DNA, 99 bp, homo sapiens
agtggggttcatacatctatcctattagttctgtccctctagagaaccctgactaatacagattttggtaccagaagtgggattcatacatctatccta

SEQ ID NO: 8738 - DNA, 103 bp, homo sapiens
agcccccagcccagggaccctcctgccccacagtccctgcatcccctcctgcccacactccctgcatcccccagccctccagcccagggaccctcctgcccca

SEQ ID NO: 8739 - DNA, 95 bp, homo sapiens
gcttcccaaagtgctgggattacaggtgtgagccacctcgcccagactttaccattatttttttgttccgcttcccaaagtgttgggattacagg

SEQ ID NO: 8740 - DNA, 102 bp, homo sapiens
ggttaaagtacaaggacacagaatgtactcattcccttatatctaacatcctttatgtctaaaacaaatatttcggttaaagtacaaggacatagaatgtac

SEQ ID NO: 8741 - DNA, 81 bp, homo sapiens
aaagtaaaaaaacattaaaagatgtgacacttaaaatataagcacacaacacagttaaaagtaaaaagacattaaaagatg

SEQ ID NO: 8742 - DNA, 79 bp, homo sapiens
ggtaattattccccccaaataattccccccaaaactcaaatagccttgagttttggtaattattccccccaaattattc

SEQ ID NO: 8743 - DNA, 82 bp, homo sapiens
tgttcagcatgaggcaggcaggcacacccagatagcagcgtcccagccctctgccagcatgttcggcatgaggcaggcaggc

SEQ ID NO: 8744 - DNA, 82 bp, homo sapiens
atcaagcccaagtctcagaactctccttccttccttcctttcttccttcttgtctttcatcaagcccaagtctcagaactct

SEQ ID NO: 8745 - DNA, 83 bp, homo sapiens
agaaagctaaatgtgataagggcgagagagagagaaagggaaaagaaggaaagaaaggaaagaaagttaaatgtgataagggc

SEQ ID NO: 8746 - DNA, 113 bp, homo sapiens
aggagaggaccacataggaactaagagctaaaggtgggaaggaaatctgggatgccagaaggaggacttcctggaggaggggaccacataggaactaagagctaaaggtggga

SEQ ID NO: 8747 - DNA, 82 bp, homo sapiens
ctgtttggagatcatggatcccctcctggaaaccatttggattctgtttggaatctgtttggagattatggatcccctcctg

SEQ ID NO: 8748 - DNA, 107 bp, homo sapiens
gtgctgggattacaggcgtgagccaccgcacctggctcaaactcttgatcttaagtgatcctcccgcctcagcctcccaaagtgctgggattacaggcatgagccac

SEQ ID NO: 8749 - DNA, 73 bp, homo sapiens
aaaaaaaaaaaaattagccaggcggtgaaactctgtctctacaaaaatacaaaaaaaaaaaaaaaaattagcc

SEQ ID NO: 8750 - DNA, 104 bp, homo sapiens
tgcctataatcccagcactttgggataatgttgagataatgttgagaaatgcagaagtattgctgggtgtgatggctcctgcctgtaatcccagcactttggga

SEQ ID NO: 8751 - DNA, 96 bp, homo sapiens
gtctggtggtgaatcctcctagtctgatgagtgcggtatccgactctggagcccagcctgttgcttcctggtctggtggtgaatcctccatagtct

SEQ ID NO: 8752 - DNA, 94 bp, homo sapiens
ggaagcaacagcctgggctccagggtcagacaccagactcaccagactatggaggattcaccaacacactgggaagcaacagcctgggctctag

SEQ ID NO: 8753 - DNA, 95 bp, homo sapiens
tggtgacaaatcctccatagtatggtgagtgcggtgtctgactctggagcccaggctgtcacttccctgtctggtgacaaatcctccatagtctg

SEQ ID NO: 8754 - DNA, 96 bp, homo sapiens
cttgtgtactctaaggcttatatttttgaagtctttccatgtacaaatgtaatgtatcactatcattacaccttgtgtactctaaggcttttattt

SEQ ID NO: 8755 - DNA, 391 bp, homo sapiens
tagagagtagcatcacctgggtgatgaaagaaaagatatgtcatcatacccctgcaggcaaagcccatgcaggagagtcacatcacctaggtgtggggcccaacgatatattaaaatctcttcttgggtatatcccaagcagtagaggagagtcacatcacctaggttctcagtccagcaatatgtcacaaggccccttgaggggaaggcccaggcaggagagtcacatcacttaggttaggggccaagagatgtgtcacaatgttccctgtaggaagggctcaagaagaagaggagagtaacatgacctaggggcttggtcaagttatgtgtcacaatcatacctgtgagcagggtctaggcatgagaggagagtcacatcaagtaagta

SEQ ID NO: 8756 - DNA, 95 bp, homo sapiens; identical to SEQ ID NO: 8753

SEQ ID NO: 8757 - DNA, 146 bp, homo sapiens
aaataagggattgggggttcttgccccctagaaaagtgggacttgccgctaagggtgaaggagaaggggttgaggggttcttgcccctgccccagaaaagcagagaaggggtagagacaaggagagaaggggttgaggggtacttg

SEQ ID NO: 8758 - DNA, 156 bp, homo sapiens
ctgaggaagggacaagtacccctcaaccccttctctccttgtctctaccccttctctgcttttctggggcaggggcaagaacccctcaaccctttctccttcacccttagcggcaagtcccgctttcctggggcaggggcaagtacccctcaaccc

SEQ ID NO: 8759 - DNA, 497 bp, homo sapiens
gggaagtgaggagcgtctctgcctggccacccatcatctgggatgtgaggagcccctctgcctggctgcccagtcggaaagtgaggagcgtctctgcccagccgccatcctgtctaggaagtgaggagcgtctctgcctggctgcccatcgtctgggatgaagtgaggagcatctctgcccggctgcccatcgtctgagatgtggggagtgcctctgccccgccgccccgtctgggatgtgaggagcgcctctgccccgccgccccgtctgggatgtgaggagtgcctctgcccggccgcgaccccgtctgggaggtgaggagcatctctgcccggccgccccatctgagaagtgaggagaccctccgcccggcaggggccccgtccgggagggaggtggggggggtcagccccccgcccggccagccgccccgtcctggaggtgaggggcgcctctgcccggcggtccctactgggaagtgaggagcccctctgcc

SEQ ID NO: 8760 - DNA, 97 bp, homo sapiens
gaatcctccatagtctgatgagtgtttttgtctgactctggagcccatactgttgcttcctggtctggtgaggaatcctccatagtctggtgagtgt

SEQ ID NO: 8761 - DNA, 105 bp, homo sapiens
tttttagctaccttatcagcataagcattgtcctaagtgatgggatctgatgccttttgatggctggttttttagctaccttatcagcataagcattgtcttaag

SEQ ID NO: 8762 - DNA, 82 bp, homo sapiens
tgaattacatcgatttttgtatgctgaaccagccttccatcccgggaataaagctgacttgaattacatcaatttttgtatg

SEQ ID NO: 8763 - DNA, 108 bp, homo sapiens
gagctcaagcaatcctcccacctcagcctcccaagtagctgggactacaagcacataccactacacctggctctttaaaactcgagctcaagcaatccacccacctca

SEQ ID NO: 8764 - DNA, 109 bp, homo sapiens
atcacctgagtgcttggccagagatttgtacaatattccccgctagaagggaccaggcaggagaggactatcacctgggtgcttggccagagatttgtacaatattccc

SEQ ID NO: 8765 - DNA, 109 bp, homo sapiens
cccctgtctgcctcacctgcctgtgcctggtagcctgttctgtgccttccgtccagcccaggcaactgcagtcccattcccctgtctacctcacctgcctgtgcctggt

SEQ ID NO: 8766 - DNA, 147 bp, homo sapiens
cacagccagctaatttttgtatttttagtagagatgggatttcaccatggtggccaggatggtctcaatctcttgacctcgtgatcttcccacctcagcacagccagctaatttttgtatttttagtagagatggggtttcaccatg

SEQ ID NO: 8767 - DNA, 89 bp, homo sapiens
ttctttttaaaggctcatgtccttttaaaggttcgtgtcctttacccacctttgtttgttttttttctttttaaaggatcatgtccttt

SEQ ID NO: 8768 - DNA, 96 bp, homo sapiens
caggcagcagagtcacatcacctgggtgctgagcccagcaatcagtaacaatgctctctgtggtccaggcccaggcagcagagacacatcacctgg

SEQ ID NO: 8769 - DNA, 99 bp, homo sapiens
gctcttgttgcccaggctggagtacaatagtgctaactttatttatttatttacagacgaagttttgctcttgttgcccaggctggagtgcaatagtgc

SEQ ID NO: 8770 - DNA, 109 bp, homo sapiens
gtgctccaaggccccaccaaagcagctagatacagagtgtcgattggtgcactcacaaaccctgagctagacacagggtgctccaaggccccaccaaagcagctagata

SEQ ID NO: 8771 - DNA, 123 bp, homo sapiens
gaacatgaattgtgaagatttcatggacatttattagtttcccaaattaatacttttataatttctcacacctgtctttactgcaatctctgaacataaattgtgaagatttcatggacattt

SEQ ID NO: 8772 - DNA, 118 bp, homo sapiens
ataaattgtgaagatttcatggacatttattagttccccaaattaatacatttatttcttacacctgtctttactgcaatctgtgaatataaattgtgaagatttcatggatatttat

SEQ ID NO: 8773 - DNA, 132 bp, homo sapiens
ttctttgtgatgtgtgcattcatctcacagagttgaacctttatttttattgagcagtttggaagaactctttttgtacattctgcaagtagatattctttgtgatgtgtgcattcaactcacagagttgaa

SEQ ID NO: 8774 - DNA, 11352 bp, homo sapiens
tctttctgattagaatctctggtgtcagctggggttctccgctattagaatgcctggggccaccctggtatctctttaattagactgcttgttgtcagccaggagtctctttaattagaatgcttggaattgcccaagcgtctgtatcattagatggcctggggccagccaggaatctctcccatcagaatgcatgaggtttgctgggaatatctaaagttagaatgcctgaggtcacttaggtgactctatcattagaatgcctggggtcagccgggagcctctcccattagaatgcctggggttgttcaagtttcactatcactaaaatgcctggggctgactggggtctctcccataaaaatacctgtggacagccagatatctctatcattagactgcctgaggtcactcaggagtctctatcatttgattgccaggggtcagccaggaatctctcccattaaaatgccttgggtcgttcaggtgtctttatcattagaatgccaggattggggggcctctctaataaaaatacctggggtcgctgaggtgtctttatcattaggctgcctagggttgccaagatgtctttatcattagaattcctgagttcagccaaaattctctcccattagaatgcctgtggttgcccaaatgtctttatcattaaaatgcttggggttggccaggagtctctcccattagaatgcctatgatcacccgggtggctctatcattagactatctgaagtcggccagtagtctctttcatcagaatgtttgggtggcccaggtgtctctatcattagactgcctggagttggtctggattctctccagttagaatgcctgggttcgctcagctgtctctatcactagaatgcctggggtcatgcaggagtctcttctattagaaagtttggggtagcccaactgtctttatcattagactgcctggggttggccaggagtctctctcattagaatgcctggagtcacccaaaaatctgtataattagactgcctggggttggccaggagccttttcctttggaatgcttggggtcacccaggtgtctctatcattagactgcctgggtttggcagaacgtctctcccattagaatgcctgtggtcatgaaggagtctctatctttagactgcctggggtcagacaagattctctcccataagaatcactgggtttggccaggaccctctcctatcagaatgcctgaagctgcctagatgtctccatcattagactgcttcgggttaaatgggaaattctcccattagaatgcctgggttcacccaggtgtttctatcattagactgcctgggtttggccaggtgtctctttcatcagaatgcctggtgctggccaggagtctctcttatttgagtgcctggtgtcgtggaggtgtctatatcattacaatgcctggggccactcaggtgtctctatcattaaaaagcctcaagttgaccaggagtttctctcattagaatgtctgtgttcacccagttgtctctatcattagactgcctggggtcggccgggagtgtctgtcattagaatgcctgcagtcgcccaaatgtctccgtcatcagacttcctggagtcagcagggagtctctaccattagaatgcctgaggtctctcaggtgtctctataattagattacctggggtcagccaggaatctctcccattagaatgcctggagtttcccaggtgtctctatgcatagactgcctctttcagccagaagtctctcccagtagaatgcctgggttctgctgggagtctccccttttagaacgcctgaagacacccaggtgtctctttaattagactgcctggggtcagccaggggtctcttccattagaatgcctgtgctcgtcaaggtgtctctatcaataaactgcctgcagtttgccaaaagtctctcacattagaatgcctggggtcaagcaggtgtctctgttattagcaagctttgggttggccaggagcctctcctattaaaatgcctggagttgagcagaagtgtctcccattagaatgcatgtggtcgcccatttgtctctatcaatagactgcctgaaattagacatgggtctctcccactagaatgcctggggtcgcacaggtatctcaatcattagatttttggggttggctgagagtctctcccattagaacaccttcggtcacccaggtgtttgtttcattagactgcctggtattggctgggagtctctcccattaaaatgtctggggtctcccaggtgtctctatcaatagactgcttgggtccgtcagaagtctctcccattaaaatgccttgggttggatgggagtctctattattagaatacctttgattgcccaggtgtctcttatcagattgccttaggtcagctaggagtctctctcattagaatgcctgtggtagcccaagtttcactttcattagactgcctatggccggccaaacttctttcacattagaatgcctgggatcgccagctgtctctatcattagactgcctgtggtcagccaaaagtctcccattaaaatgcctggggtcccctaagtgtctctatcattaaactgcctgggttcgttatggagtctctcttattagaatgcctggagttacccaggtttctctatccttagactgcctgaagtttgacaagagtctctcccattagaatcactggggttcaccaggagtctctcacattagaatcctttgcattgcccagatgtctctatcattacaatgattggggtggcccacttgtcttcatcattagaatgctggggttcagccaggagtctctctgattagaatgccttctctatcattagactgcctggagttgcacaggtatctctatcattagaatgcctggggtggtccaagattctttcccattagaatgcctggggtcacccaagtgtctctaacatcatagtatctggtgtcaactgggaatctctttcattagaatatttggggtcgcccaggtgtctctatcattagactgccttgggtagccaggagtctctcccattagaaggcctgagtttgcccaggtgtctctatcattagactgcctgggatcatcctaatatctacctcattagaatgcctggtgtcagccaagattctctcccatttgagtgcttagagtagcataaatgtctctatcatgacaatgcctggggcatccaggtttctttctcattacaatgacttgagacgaccagtattctatcccattagaatgcctgtggtctccaggtgtctctattgtaatactgcctggggtcagatgaaagtgtctcccattaaaatgtctggggttgctcaggtgtctctattattagacagcctggggtaggccagaagtctcctccatttgaatttctgtggttgtccagtgtctctatcattagacagcctgtggtctcccaggagtctctccatcagaatgcctggtaatgaccaaaagtctttcacattagagtgcctggggttgcccaggtgtgtctaccattaaaatacttgaggttgcccagttgtctctatcattagaacaccaagattctgtgggaagtctctcccattagaatgcctaggtttgcccaggtgtttctatcattagactgccttgtgtcatccgggagtctctcccattagaatgactggggtcgccaatgtgtctctatcattagaattcctggggttggctgggggtctctcctgtaagaatggctggggtcacccaggtctctctaacattagactgcctggttttgcacaggtgtccctaagattagaatgcctaggatcgtcagggagtctcaaccaatagaatgcccatggtcacccaagtgtctctatcattagactgcctagggtcagcttagagtctctcccattagaatgtgtggggtcacccaggagtctatataattgaactgcctgagtttgaccaggagtctgtctcattagaatgcctgggatcactaaggagtctctatttctagattgccaggggtcggacgaaagtctctcattagaattaatggggttgcccaggtgtctctataattagactatctgggttaggccaggaatctttcccattagaatgcctggggtcgtttaggtgtctctatgcgtagactgcctggagttggccaggattcactcccattagaatgccttctgtcacctgaaagtctctcctattagaatgcttgggggcacccaggggtctttttaattagactgcctggggtcgtccaggactccttctcattacaatgcctctggtcgcccagttgtccctatcaatagactgcctggggttggcctggagtctcttccattaaaatgcctggggtcacccaggtacctctataattagattgcttggggccatccaggtttctctttcattgggatgcctgtgattgcccatgtttctctaaaattagactgcctggggtcggccagtagtctctcccattagaatgcctggggtcacccaggtttctctataattagactgtgtggggtccaccaggaatctctcccattagaatgcctgtggtcacccaggtgtctcatcaacagactgcatgggtcagccacgagtctctcccattagaaagtctggtgtcagctaggagtctcttttatttgaatgcctggggtcattcacctgtctttttaattcgactgcctgaggtcacttaggaatctcttccattacaatgcctgaggtcgcccaggttgcactttaattagactgtctggggttggccaggagtctcttttattagaatgcctgtggtcaccgaggtgtctctatcattagactgcctgtggtcagccaggtgtctctccattagaatgcctgagtttagccaggagtctctcacattagaatgcccgtggtcacccaagtgtctctattattaaaatgcttggggccacccacgtgcccctatcattagcatgccagggttcagcctggagtgtctcccattagaatgcctgaggtcgcccaggtgtctctatcattattctgtctggtgttggcttgggtgtctctcccattaaaatacctagtttcatccaggtgcctctatcattagaatgcctgtggttggctggaggtctctcccataagaatgactgtggttgcccagttctctctatcattagactgcctggggtcacagaggtgtctctattattagaatgcctaaagtcttttgggagtctctctcattagaatgcctagagtagcccaagtgtctttatcatcacactgcctggggttggttgggagtctctttcattagaatgcctggggtgtcccaggagtctgtataattagactgactggggtcaggaaggagtctctcccattaaaatgcctggggtagaccaagtgtctctatcattagactgcctaggtactgccaggagtatctcacattagaatgcctggattggaccaggagtctatccctagactgcctgaagtcgaataatagtctctcaccttagaatgactgaggtagccagaagtctctccaattagaatggctgggttcgcccaggtatatttatcattagactgcctggatcttcctggagtctctctcattagaatgcctggtgtcagtcaagagtctctcccatttgaatacctggggtcacacagatgtctctatcattacaatgcctggggtcacccaggtgtctctataattacaatacctcgggacgatcggtagtctctcttattagaatgccttcggtcaccaggtgtctctatcataatactgcctggggtcacacaggagtatctcttattagaatgcctggggttgcccaggtgtttctatcattagactgcctggagtcagctagaaatcttccccattagagtgcttggggtcacccatgtgtctctacccatagactgcttgggtcagccaagagtctctcccaggtttctctctcattagactgcctggtgtcagacaggagtctctctcaatcgaatgcctggtgtcaacggaaagtttctcccattagagtgcctgggttctcacaggtgtctctatcattgcaatgcctgggttgcccatgtgtccctatcattagaaagcctcatgtctgccaagagtctcccgcattagaatgcctgcaatcgcccaggtgtctctattattagatttcctagggctggccaggaatctatcccattagaatgcctggggtcccttaggtgtctctatgcatagattgcctggtgtaggccacgagtcacttccattagaatgccttgggccggctaagtctctcctactagaatgcctcaggtcacccagtggtcattttaattagactgccttctctcccattagcatgcctggggccacccacctttcacttcaattagactgcctgtggttggccaaaagtctctcacattagaatgcctggggccacccagggttttctatcattagactgcatgtggtcagccaaaagtttctcccattaaaattcctgaggtcccccaagtgtctctattattagactgcctgggttcggctgggagtctcatattagaatgcctacagtcacccaaatttccctatccttagactgcctgaagccagacaagagtttctcccattagaatcgctggagcttgccaggagtctctcacattagaatgtctggggtcactcaggtgtctctatcattaaaatgatttctcttttattagaaagcgtggggtcgcttaggtgtctcttatttagactgcctggggtttcccaggtgtctctatcattagactgcctggggttgcacaggtatccctatcactagaatgcctgcggtggtctgagagtctttcccataagaacacctggggtcacccaagtgtctctttcatcacactgactggtgttgtctgggagtatctttcattagtgtctctaacattagattgcctggggtcgttggggagtctcctccattagaatgacttgggtggcccaagtacctctatttttagactgcctggggtgggctgagagtctctcctattagaatgcttgtggtcgcccaggagtctgtataattgagcttcctgggttcgaccagggctctctcccattagaatgcctggggtcgcccaggagtctctatccttagactttcagatgtcagatgaaagtctctttcattagaatgcctggggtcgccaaagtgtctctataattagactgtctgggttcggccaggtatgtatttcattagaatgccttcactcccaatagaatgctttcggtcagccgaaagactctcctattagaatgcctggtggcacccaggggtctttaattatactgcctgaggtcgtccaggcgtctttctcattacaatgcctagggtcacccagatgcctctatcattagactgtctgtggtcatccaggagtctctttcactgaaatgcctgcggttgcctatttgtctctatcattagactgccttctctcccattagaatgcctggggtcacccaagtttctctataattagactgtgtgaggtcagccaggaatctctcccattagaatgcctccagtcacccaggtgtctctatcaacagactgcttgggtcagccaggagtgtctcccattagaatgccttgggtcagctaggattctctcttatttgaatgcctggggtcgcccaggtgtctttttaataaaactgcatgcagttggccaggagtctctcccattagaatgccaggagttgcccatttgtcactttaattagactgcgtttagtcggccaggagtctctcctattaaaatgcctgtggtagtccaggtatgtctatcattagactgcctgtgcttagccaggaatctctccattagaatgtctgaggttagccctgagtctgtaacattagaatacctgtggttgcccaggtgtctctatcattgaaatgcttggggttgcccacttgtctctatcattagaatgcctggggtgggccagaaatctctctcattagaatgcctgttgtcacccaagtctctatccatagactgcttgggttggccaggagtctctcccattaaaatgtctgggtctcccagtttctctatcattagactgtctagggatgactggaagtctctcccattagaatacctgggttgcccacgtgtctctattgttagactgcctggcatcagacaggagtctctcattagaatgtctgatgtcaaccaaaattctctcccattagaatgcctggggtctcactggtgcctaaataattacaatgcctggggtctcccaggtttctctatcattagaatgcctcgggttggcagagagtctcttgcattagaatgcctgcaatcgcccagttgtctctatccatagactgcctggggtcaaccgtaagactctcccattataatgcctggaatcgcccaggtgtccctatgcatagaccgtctggggtcggccaggaatctctcttattagaatgcctgaggtcgcccaggtgtctctatcaataaactgccagaagtctcccccattagaatgtctgagattgggtaggagtctctcttattttaatgcctggggtcacccaggtgtctatttaattagactgactggggtcggccaggggtctctcccattagaatgcctgggatcacccaggtatctctatcattagactgcctatgcttagccagttgtctctccattagaatgccagaggttggccaggagcctctcacattagaattcctatggtcactcaggtgtctttatcctgaaaatgattggagccacccacttgtctctatcatttgaatgccaaggtttggcctcgagtctctcctattagaatgcctggggctgcctaggtgagtctgtcattatactgtctggggttgtttgggagtctcttccattaaaatgcctggtgtcacccaggtgtctctatctttaggatgcctgtggtcggctgggggtctctctcattagaatgcctggtgtcagccaagaataactcccatctgagtgcctggggtccacaggagtctctatcattgaaatgcctggggtcacccaggtgtctctgtcattacaataccttgggacgaccagtagtagtctcttccattaaaatgcatggggtcaccaacttgtcactttaattagactgcatggggttggcaagcagtcgctcccattagaatgcctgcggtcaccggtcaccaaggtgtctctatcattagactgccttgggttggttgggagtctctcccattataatgcctggtgttgcccaggtgtctctatcattagactgccttctcccttattagaatgcctggtgtcagctgggagtctttctcatttgagtgcctggggtcgcacaggtgtttctatcattaaaatgcctcaggtcgcccaggtgtctctattattaaaatgcctcgggatgactgagagtctctcccattagaatgcctgtggttgcccaggtgtctcaatcataagactgcctgaggtcagatgggagtctctcccattagaatgcctggggtcacttaggtgtctctatcattagactgcctgagttcggccaggaggcttttccattagaatatctgggatccgccggcaatctttcccattagaatgtctgggttttgccaaaagtttatcccattagattgtctggaatcacccaggtgtctatatcaccagactacctggtcgactggaagtttctcacattagaatgccttgggtcgcccaggtgtctctatcattagactgcctggggtcagctgggagtgtctcccattagaatggctgaggtctcccatgtgtctctataattagacagccttctttatccttagactgcctagattcagccaggagtctctttcattagaatgtctgttgttgcccagatgtctctactcttagactgcctaggttccatcaggggtatctcccattagaatgtcttgggtcagccagggtctctccctttaaaatgcctggggttcatcaggggtccctcccaatagaatgtgttgggtaacctgggagtttctccttttaaaatgcgtggagtcccccaggtgtctctatcattagaatgcctgggctcaaccacgggtgtttccaataagaatgcctgtggcctcccagtgtctccatcattagattgcctgcagtcagccagggttctctcccattagaatgcctggggttgcccatgtgtctcaataattagactgcttgcaatcagcaagaagtctctcccaagagaatgcctggggttgagttggagtctctcccaataggaaggctgtgttctcccaggtgtcactattattagaatgcctggggtcagctagaagactctcacattagaatgtctggtctcaccgaggtgtctctatcattagacggcctctggttggctggtagtttctcctattagaatgcctgggatcatctggatgtctttaccattagactgcctggggttggccaggagtctctcccatttgaatgcctggggtcggctgggagtctctcccattagaatacctggggttgtccaggtgtctctatcattagactgccggggttggcctggagtctttcccattagaatgcctggagtcgcccaagtttctctgagactgcctggggttggccaggagtctctcccactagaatgttcagccaggagtctctttcattagaatgcctggggttgcccaggtgcctctatcattagactgcctggattcagccaggagtctctcccattagaatgcctgctgtcactcgtgtggctctattattagactgctggggttggcctggaatctctcccatttgaatgcctggggttgccaagatgtctctatccatagactgcttgggtcggcaaggagtctctcccgttagaatgcctttagtcggctgggagtctctcccattagaatgtttagttaagcccatgtttcactttattagactgcctggggtcacccaggagtctctcccattagaatgcctgggttgcccaggtttctctatcattagactgcctgtggtcagccaggagtctctccattagaatgcctggggttggccaggagtctctcacattagaatgcctgtggtcgcccagttgtctctatcattaaaatgctt

SEQ ID NO: 8775 - DNA, 89 bp, homo sapiens
acagatagcctgtttttcattcttatctctagatatgactccacacatcacaaaacatcctcacagatagcctgtttttctttcttatc

SEQ ID NO: 8776 - DNA, 93 bp, homo sapiens
tgaccaagactgatgtgctaagtatcagtaaatactgctcactttcttacataagctacatcttctaatatgacaaagactgatgtgctaagt

SEQ ID NO: 8777 - DNA, 89 bp, homo sapiens; identical to SEQ ID NO: 8775

SEQ ID NO: 8778 - DNA, 93 bp, homo sapiens; identical to SEQ ID NO: 8776

SEQ ID NO: 8779 - DNA, 91 bp, homo sapiens
gacccttatcagtggttctccttttgccctttgtcctgttccttcagaagcatgtgatctttgttggacccttatcagtggttctgctttt

SEQ ID NO: 8780 - DNA, 86 bp, homo sapiens
acccaacacagaggagagagaaccctcggcgaggtgtagaagactcactggagacatcatacccaacacagaggagagagagccct

SEQ ID NO: 8781 - DNA, 92 bp, homo sapiens
agaggctgaagtgaagttacaaaggtcacgttctatgtaaacatctgattggttgtggaaagcaaccaagaagctgaagtgaagttacaaag

SEQ ID NO: 8782 - DNA, 87 bp, homo sapiens
gggaggtgaatccctcatcaggcgccctctgctgagtgagtgatggctatggagatggcggggaggtgaatccctcatcagggcccc

SEQ ID NO: 8783 - DNA, 99 bp, homo sapiens
accgtgtttctctctttctctctctctctctcaatatatatctctctctctttctatctctctcattttctctctctctctttctctctctctctctct

SEQ ID NO: 8784 - DNA, 87 bp, homo sapiens
ggtgggagagggtgaggccctgctggcgacccgtgagagccccagggtgtgctgggacacgggtgggagagggtgaggccctgctgg

SEQ ID NO: 8785 - DNA, 97 bp, homo sapiens
ttttacattccttttattaatttacattccctctattaattacaaatctgtaagaatttctgtattcctatagatttacattccttctattaattac

SEQ ID NO: 8786 - DNA, 86 bp, homo sapiens
ttagaccacaggtcctccccaggtcgggacctctgcctgcccatatccactaaggacgtgaggttaggccacaggtcctccccagg

SEQ ID NO: 8787 - DNA, 106 bp, homo sapiens
tggagtgggaaggcccagcccttgcagacctgtgctgagggcacaggcacaggggggcccgcgtctcaggcactgtccaggtggggtgggaaggcccagcccttgc

SEQ ID NO: 8788 - DNA, 88 bp, homo sapiens
tgggtatatatttgaatgaattgaaatcatatgccagatacctgcactcctatgtacctctgggtatatatttgaatgaattgaaatc

SEQ ID NO: 8789 - DNA, 82 bp, homo sapiens
gcaattcaagcccaattccttcccgaaggaaggaagagagggacgaaaagaaagaaaagcaattcaagcccaattcctccct

SEQ ID NO: 8790 - DNA, 76 bp, homo sapiens
gtgtctgaggatgcagaccagcacccacccctctgttgggagcaaagctggggtgtctgaggacgcagaccagcac

SEQ ID NO: 8791 - DNA, 116 bp, homo sapiens
ttgttttaagttttagggtacatgtgcagggtccagggtgaaaccatctctgcccaggaaaatctcagtaaatgctttttttgttgttgttttaagttttagggtacatgtgcagg

SEQ ID NO: 8792 - DNA, 88 bp, homo sapiens
tgcctcagcctcccgagtagctgggactacaggtgcatgccaccacacctggctaatttttgtgcctcagcctccctagtagctggga

SEQ ID NO: 8793 - DNA, 88 bp, homo sapiens
tgcctttccctaatccaggctcccgggttgggggagctccagagtggcagcccagcaggaccatctgcctttccccaatccaggctcc

SEQ ID NO: 8794 - DNA, 81 bp, homo sapiens
taatgtgcattttacatattatttattttacatattacttattacttattttacatattagtgattttacatattattact

SEQ ID NO: 8795 - DNA, 153 bp, homo sapiens
cccccaccccttctctccgtgtctctaccctctcttttctctccactttcttgtggggaaacactccccactccttcttcactttcctctgggtggcaagcatcccccaccccttctctccctgtctctaccctctcttttctctccactttc

SEQ ID NO: 8796 - DNA, 94 bp, homo sapiens
gaaagaatgaagcaacaaaagcagagatttactgaaaatgaaagtatactccacgtgatgagagaaagaatgaagcaacaaaagcaaagattta

SEQ ID NO: 8797 - DNA, 111 bp, homo sapiens
aggctggtctcgaactcctgacctcatgtgatccgcccacctaattttgtgtttttagtagagatggggttttgccatgttacccaggctggtctcaaactcctgacctca

SEQ ID NO: 8798 - DNA, 75 bp, homo sapiens
acacaaaggttctccatgtccccactagattagctagatacagagtgtccacacaaaggttctccaagtccccac

SEQ ID NO: 8799 - DNA, 111 bp, homo sapiens
gtaatcccagcactttgggaggctgagacgggttgatcacttgaggccaggagttcaagaccagcctgccagctgggcacggtggtaattccagcactttgggaggctgag

SEQ ID NO: 8800 - DNA, 94 bp, homo sapiens
ataagatcccttttgaatcttcatttctttgaaggaatcaagcattcttaaggattcttttcctcaaagataagatcccttttgaaccttcatt

SEQ ID NO: 8801 - DNA, 99 bp, homo sapiens
gggaagcaacagcctgggctccagagtcagacactacacccagcagactatggaggattcaccaccagaccgggaagcaacagcctgggctccacagtc

SEQ ID NO: 8802 - DNA, 113 bp, homo sapiens
aaaattggtttattttagtagcacttttagtaacacaaaagtgcttttattttagtagcacttttagtaacacaaaagtgctactaaaattggtttattttagtggcactttt

SEQ ID NO: 8803 - DNA, 72 bp, homo sapiens
tctgagattaaggcccatcaatgaataattgttgttgctgcccatcaatctgagattaaggcccatcaatct

SEQ ID NO: 8804 - DNA, 94 bp, homo sapiens
tcccagtgactccagaatctgatgatctcatgactccagaccttccttgactccccagtggcctcagactctcccaatgactccagaatctgat

SEQ ID NO: 8805 - DNA, 117 bp, homo sapiens
tctgtcacccaggctggtgcgcagtggtgccaaccgtactcaaccttatttatttatttattttaatttattaagacagggtctcattctgtcacccaggctggtgcacagtggtgc

SEQ ID NO: 8806 - DNA, 84 bp, homo sapiens
cccatctctactaaaactacaaaaattatccaggtccatcctggctaacacggtgaaaccccatctctactaaaaatacaaaaa

SEQ ID NO: 8807 - DNA, 93 bp, homo sapiens
tttacaatcctttagctagacacagagtgctgattggtgtgtttttacagagtgctgattggtgcatttacaatcctttaactagacacagag

SEQ ID NO: 8808 - DNA, 116 bp, homo sapiens
cttgaacccgggaggcggaggttgcagtgagcagagatcatgcctataatcccagttactcaggaggctgaggcagaagaatcgcttgaacccgggagacggaggttgcagtgagc

SEQ ID NO: 8809 - DNA, 98 bp, homo sapiens
accaatcagaggctgaagtgaaggtacaaagttacaccctatgcaaacgtctgatgggtcgcgggaggggaccaatcagaggctgaagtgaagttaca

SEQ ID NO: 8810 - DNA, 85 bp, homo sapiens
atgattcaaagtgaggctaatgggtttttattgttagattcaaaaacaaagtttttattgttagattcaaagtgaggctaatggg

SEQ ID NO: 8811 - DNA, 83 bp, homo sapiens
cctccctgcatgcatcttttttatttttgctttttccagtaagccttttgcacccctaacctgcatgcatctttttttttttt

SEQ ID NO: 8812 - DNA, 529 bp, homo sapiens
acaggagagaaaccttataattgtgaggaatgcgggaaggccttcattcacgattcccagcttcaagaacatcagagaatccatacgggggagaagccattcaaatgtgatatatgtggtaagagcttctgtggtagatcaagacttaataggcattccatggttcacacggcagagaaaccattccgatgtgatacgtgtgataagagctttcgtcagagatcagcacttaatagtcatcgcatgatccacacaggagagaaaccatacaaatgtgaggagtgtggaaaaggctttatttgtaggcgagatctttatacgcatcatatggtccacacgggagaaaagccatataattgtaaagagtgtgggaagagcttcagatgggcctcgtgtcttttgaaacatcagcgagtccacagtggagaaaaaccattcaaatgtgaagaatgtgggaaaggattttacacaaattcacaatgctattcccaccagagatcccatagtggagaaaaaccatacaaatgtg

SEQ ID NO: 8813 - DNA, 277 bp, homo sapiens
agtggagaaaaaccattccaatgtgaagagtgtgggaagagatttactcaaaattcacatcttcattcccatcagagagttcacactggagaaaagccatacaaatgtgagaagtgtggaaagggctacaatagtaagtttaatcttgatatgcaccagaaggtccacacaggagagagaccatacaattgtaaggaatgtgggaagagttttggctgggcctcgtgtcttttgaaacatcagagactgcacagtggagaaaaaccattcaaatgtg

SEQ ID NO: 8814 - DNA, 85 bp, homo sapiens; identical to SEQ ID NO: 8810

SEQ ID NO: 8815 - DNA, 83 bp, homo sapiens; identical to SEQ ID NO: 8811

SEQ ID NO: 8816 - DNA, 131 bp, homo sapiens
gttctggaggtcagaagccaacaatcagcttccctgggcaagcaaacaagaaagagaaaagaaaggaaataacacagatttattctcttacagttctggaggtcagaagccagcaatcagcttccctgggc

SEQ ID NO: 8817 - DNA, 76 bp, homo sapiens
gattggaagaattacacttccgcccaggcgcagagccctggcacagggtaggattggaagaattacacctccgccc

SEQ ID NO: 8818 - DNA, 92 bp, homo sapiens
taaataacgttaaggcacacaaaaagttaaaaaagactcacaaaaagttaaataaggtactctgtaagtaaataaggttaaggcacacaaaa

SEQ ID NO: 8819 - DNA, 98 bp, homo sapiens
ttttgaggtggagtcttgctctgttgcccaggctggaatgcaatggtgcaatctttttttttttttttttttgagatggagtcttgctctgttgccca

SEQ ID NO: 8820 - DNA, 92 bp, homo sapiens
ttagttaatagaatgttattacatactgttattgtattatattaactaataactagttattagttaatagtatgttattacatactgttatt

SEQ ID NO: 8821 - DNA, 199 bp, homo sapiens
aaaaacaaaggaaggaaagaagaaagaaaagagagagagacagagagaaagaaagaaagaaagaaagaaagaaagaaagaaagaaagaaagaaagaaagaaagaaagaaagaaagaaaggagggagggagggagggagggagggagggagggaagctaaacagagcaactgtgggagaggaagaaaatgagcactaaag

SEQ ID NO: 8822 - DNA, 109 bp, homo sapiens
tatcacttctcaatggaaaaaattacgtataaaaaaaccagcagagtttgtggttgaaatatgaacagcatgaatatgtacaactatcacttctcgatggaaaaaatta

SEQ ID NO: 8823 - DNA, 86 bp, homo sapiens
taatagcctaccaaccaaaaaaaaaaatagaccaataacaagttctgaaattgagacaggcagtaatagcctaccaaccaacaaaa

SEQ ID NO: 8824 - DNA, 112 bp, homo sapiens
taaagtacatatctttgcattcaagacatcacaggacccctactcaaaacaccgtgtgtgtgtgcgcgcgcgtggcataacatataaactacatatctttgcattcaagaca

SEQ ID NO: 8825 - DNA, 85 bp, homo sapiens
gcctccctagtagctggcactacaggcatgcaccaccatgctcggtgattctcccacctcggcctccctagtagctgggactaca

SEQ ID NO: 8826 - DNA, 100 bp, homo sapiens
tcagtgactgatatggtttgggtttcagatgctcttctttttctcttgtttcttaagataaacactgtattcgtccatcagtgactgatatggtttggat

SEQ ID NO: 8827 - DNA, 79 bp, homo sapiens
ggccaagctgaatagcccttaggaataatcacttcaactcctgattggtcccgggccaagctgaatagcccttatgaat

SEQ ID NO: 8828 - DNA, 97 bp, homo sapiens
gggtcccagggaattctgggaagtgtagtccagacgctcagtggagtcgcggtcagtttggctccggctggcgggtcccggggaattctgggaagtg

SEQ ID NO: 8829 - DNA, 105 bp, homo sapiens
tttttttttctgagacagagtctcgctctgtcactcagctggagtgcatttcccttccttcctccctcccttccactttttttttttttttctgagacagtgtct

SEQ ID NO: 8830 - DNA, 108 bp, homo sapiens
ctcaaactcccgacctcagttgatccacccacctcggcctcctcaaactcccaacctcaggtgatccacccacctcggcctcctcaaactcccgacctcaggtgatcc

SEQ ID NO: 8831 - DNA, 83 bp, homo sapiens
gaggcagggcccaggctgcactctgagggaacacgtctgtgtccacagcaaagctcccagaggcagggccaggctgcactctg

SEQ ID NO: 8832 - DNA, 81 bp, homo sapiens
ggaggttttctgccgcccaaatcaccactaattgtgttactgatagaaacaacgcaggaggttttctgccgcccaaatcac

SEQ ID NO: 8833 - DNA, 90 bp, homo sapiens
ctcctggtggcctgtgtggcctctggcaaggccctttctcctgggccaaggatcttcaggggcctggctcctggtggcctgtgtggcctc

SEQ ID NO: 8834 - DNA, 83 bp, homo sapiens
tctgctctcaggctgtgtgtgtgtgtatgtgtgtgtgtgtgtgtgtgtgcgcgcgcgtttgctctgtctcaggctgtgtgtgt

SEQ ID NO: 8835 - DNA, 93 bp, homo sapiens
tctcaagggtggggagggtgtatcatacaaagtacattcacaagggtgggggaatatcacaaagtagttatcacaagggtggggagggtgtat

SEQ ID NO: 8836 - DNA, 81 bp, homo sapiens
tgctgggattacaggtgtgagccaccgcatccggtcctgcctcggcctttctacatgctgggattacaggcgtgagccacc

SEQ ID NO: 8837 - DNA, 100 bp, homo sapiens
ggtgaaaccctgtctctactaagaatacaaaactaatcacgaatttgagaccagcctggccaacagggtgaaaccctgtctctactaaaaatacaaaact

SEQ ID NO: 8838 - DNA, 104 bp, homo sapiens
aggcactggctgggctgctgacagatggagaggagagggaccggcagggagagggactacccgacggacagagaagggcaggcactggctggcctgctgacaga

SEQ ID NO: 8839 - DNA, 96 bp, homo sapiens
tcttctagaatttcatataaatgaaatagtatcatatagagctttctgtaactacagattatttccatatcttctagaatttcatagaaatgaaat

SEQ ID NO: 8840 - DNA, 94 bp, homo sapiens
atacactgaaaaccactgacttgtacactttaaatgggcactttaaatacactgaaatacactttaaatacactgaaaaccgctgacttgtaca

SEQ ID NO: 8841 - DNA, 106 bp, homo sapiens
gggaggctgaggcaggagaatcgcttgaacctgggaggtggagattgcagtgagccgagcgcctgtaatcctagctacttgggaggctgaggcaggagaatcgctt

SEQ ID NO: 8842 - DNA, 94 bp, homo sapiens
cttttcatcttatatttgaaactttttcctcttacactaaaaatctgacttcccagtaacatgaacacttttcatcttatatttgaaatttttt

SEQ ID NO: 8843 - DNA, 127 bp, homo sapiens
ggagggccccagagtgttcaggcttctcagaagggtcagatgaaccaaatgaggagccctggaatagaggaggatgacagctgaagaggcctggagggccccagattgttcaggcttctcagaaggg

SEQ ID NO: 8844 - DNA, 97 bp, homo sapiens
gaggtgagttgaaggtcgctctgtcctaatcggtcacacccaaaggcagaaaaattggccttcctttgtggccgaggcgagttgaaggtcgctctgt

SEQ ID NO: 8845 - DNA, 1639 bp, homo sapiens
ttgccacactcattacatttataaggtttttcactagaatgaattcgttggtgtttagtgaggcaagaccgccgcccaaacgccttgccacattccatacatttgtatggcttctctccagtatggtttctctgatggtaaaccaagtttgacctttcgataaaagctttaccacattcattacatttataaggtttctctccagtatgcatcatctgatgattaagcagaattgaacgtactctaaaggctttgccacactcattacatttgtaaggtttctctccagtatgaatactccaatgacgtgcgaggcctgagcgataacggaagaccttgccacattcattacatttgtaaggtttctctccagtatgaattctccgatgccttgccagggttgtagtggagttaaagactttcccacattcaatacatttgtatggcatctctccagtatgtcttctctgatggtacaccagacttgttttatgactaaaagttctaccacattcactacatttgtgtggtttctccccagtaggatttctgtgatatcttgcaagttttgaactttggataaaagcctcaccaaattcattacagtggtaagggttctctccagtatgaattaccagatgtttagtgaggcttgaacgctgagtataggctttgccacaatcattacatttataaggtttctctccggtatgaattttccgatgacgtgctaggcatgagtagtaactgaagaccttgccgcattcgttacactggaaaggtttctctccggtatgacttcgcctatgaattgaaaggtttccactgtcaatgaagaccttgccacacacattacatttgtaaggtttctctccggtatgcattctttgatgacgtgctaggcatgaatagtaagtgaagaccatgccacatttattacaatggagaggtttctctccagtatgacatctcatatgaaccgaaaggtatccaccgtaattaaagaccttgccacacacattacatttgtaaggtttctctccggtatgaattctctgatgtacagttagtaatgagccccaattaaaggctttgccacattcattacatttgtaaggtttctctccagtatgaactctctgatgcactgcaagatgtgaatgttgactgaagaccttgccacattcattacatttgtagggtttctctccagtatgaattctccggtgccctgcaagacgtgaacgttgaaagaagaccttgccacattcattacatttgtaaggtgtctctccagtatgaattatctggtgccttacaagttgtgaattctgataaaagaccttgccacatacatcacatgtatatggtttctttcctgcatggattatatgatgtgcagtgaggcttgagttccgtttaaaggttttgccacattcattacatttgtagggtttgtctccagtatgaactgtctgatgagttgcaagagaggaactttgactaaagcacttcccacatcgattacatttgtaaggtttctctccagtatgaattctctgatgaactgcaaggtgggaacttttactaaaggacttgccacattcattacatatgtagggtttgtctccagtgtgac

SEQ ID NO: 8846 - DNA, 1222 bp, homo sapiens
gctttgccacactcattacacttgtaaggtttctctgcagtatgaactctctgatgttttgcaaggcttgctttttgattaaaaaccttgccacattcattacacttgtaaggtttctctccagtatgaactctctgatgttgtgcaaggattcctttttgattaaaaaccttcgcacatttattacacttgtaaggtttctctccagtatgaactctcgtatggtttgcaaggcatgaatcactccggaaagccttgtcacaaaccttacatttgtatggtttttccccagtatgaattctcctatgtctttcaaggtgtgatctgcgactgaaaactttgtcacattcttcacatttgtaaggtttctctccagcatgaagtctatgatgacgtgcaaggttttctcttcgactaaaaaccttgccacattcattacatgtgtaaggtttctctccagtgtgaagtgtatgatggtattgaagggatgacttccgactgaaactcctgccacatttattacacttgtatggtttctctccagtatgaactctctgatgttctgcaaggtatgaatcactccggaaaaccttgtcacaaaccttacatttgtatgatccctctccagtatgaatcttcctatgtctttcaaggtgtgatctgcgaatgtaaacattgtcacattcttcacatttgtaaggtttctctccagtgtgaagtatatgatggcattgaagggatgatttctgactgaaggtcttgccacactcattacacttgtaaggtttctctccagtatgaattgccttatgaattacaagggctgaatttcgaccaaaagtcttgccacactcattacacttgtaaggtttctctccagtatgaagtctacgatggcatctaagggatgacttctcactgaaggtcttgccacactcattacacttgtaaggtttctctccagtatgaagtctacgatggcatacaagggatgacatctgagtgaaggtcttcccacactcattacacttgtaagttttctcaccagtgtgacatctatgatgatatacaatgtattgcttctgattaaagatcttgccacatacatcacatttatattctctctctcttgaatgggttatgtggtgtctccttaagagtgagctataattaaaggctttgccacactcattactttggcaaggtttttctctcatgcata

SEQ ID NO: 8847 - DNA, 702 bp, homo sapiens
aatggagagagaccttataaatgtaatgagtgggacaaggcttttttttcagagttcaaaattgtaaaacatcacaggattcattctggagagaaacaaaacaaaagtaatgaatgtagtaaggcatttattcaaaattcaagtctggtggaccatcagagaactcacactggagagaaaccttacaagtgtaatgagtgtggtaaaacctttattgggcattcaagcctaactaaccatcaggtaattcatactggagagaaaccttacaaatgtaatgagtgtggaaaggcttatgtgaagtggtcccaccttagacatcatgagagtattcaaactggagagaagccatacaaatgtaccaaatgcagcaaggcctttagacaatgggcggacatcaggattcaccaaaaaatctatgctggagagaaacctcacaagtatgatgagtgtggaaaaacctttacccaggcctctcacctcactatacatcagattatccatactggagagaaaccatatgaatatgacatatatggcaaagtcttcagtcaaaattcacatttcaaaagttatcataggatttgtactgaagagaagccttacaaatgtgtgtggcaaggtcctcagtcaaaattcacaccttgtaaatcatcagagaattcatactggagagaaatcctacagatgtcatgaatgtgg

SEQ ID NO: 8848 - DNA, 190 bp, homo sapiens
gccagaccaccattgtatcccccgaccagggcgtataacccaccattgtatcccccgaccagggcacgtaacccaccattgtatcctccccacctccagggcatgtaacccaccactgtatccccccaccagggtgtgtaacccaccattttatccccctcagggtgtgtaacccaccattgtatccccc

SEQ ID NO: 8849 - DNA, 784 bp, homo sapiens
ggaaagttcactctggagcaaagcgttatgaatgcaatgaatgtgggaagtcctttgcttatacatctagtctcattaaacacaggaggattcacactggagagaggccttatgagtgcagtgaatgtgggagatcctttgctgaaaactccagtcttattaaacacttgagagttcacacaggagaaaggccttatgaatgcgttgagtgtggaaaatcatttcgccgaagctcttcactcttgcagcatcagagagttcacactagagaaaggccttatgaatgtagtgaatgtgggaaatcctttagcttaaggtccaacctcattcaccatcagcgagttcatactggagaaaggcatgagtgcgggcagtgtgggaaatcctttagccgaaaatctagccttattatacatctgagagttcacactggagaaaggccttatgagtgcagtgactgtgggaaatcctttgctgaaaactccagccttattaaacacttgagagttcacactggagaaaggccatatgaatgcattgattgtggaaaatcatttcgccacagttcttcgttccgtcgccatcagagagttcatactggaatgaggccttataagtgaagcaaattttggaaattctcttgcccaggctttttgctccttcaaggccagagagttcacaccagatcaaggtgttatgagtgtgacaaatggggaatattctttagctagaatgctagcttctttacataaaagagtgctcccactgaagaagtgccttttga

SEQ ID NO: 8850 - DNA, 528 bp, homo sapiens
tttcttttgtgaactctctgatgatgacgaagtgaagagatttgcctaaattttttttcacattcactgcacccgtaaggcttttctccagtgtgaactctcctgtgtttagtgagactggagctttcggcaaaagatttcccacattcactgcactcataaggcttctgaccagtgtgaactctcttatgaacacggaatgtagagctgtgggtaaatgacttcccacaatcactgcattcatatggcctttctccagtgtgaactctctggtgtgcaatgaggtggtacttgtgcctaaaaaatttctgacaaacctcacactcatatggcttctctccagtgtgaattctctggtgtacaaggaggtgggacttactgttaaataatttcccacatatcccacacgtataaggtttttctctagtgtgaactccttgatgattactgaagctgtcatatttgctagaggatttcccacattcacaccacacagaaggttcttctgtagggagcagtctctcgtgc

SEQ ID NO: 8851 - DNA, 276 bp, homo sapiens
gaaggtctttccgcactcggagcagccatagggccgctcgccggtgtgcgcgcgctggtgttgcaccaggcccgagcggcccttgaaggccttttcgcacagtgggcacgcgtagggcttggcgctgctgtgagtgcgctggtgccggctcaggttcgagcgctggttgaaggccttgccgcactcggggcacgcgtagggcttctcgccggtgtgcacgcgccggtgctccacgaggtgcgagaacagcccgaaggccttggcgcagtcggcgca

SEQ ID NO: 8852 - DNA, 330 bp, homo sapiens
gaaggccttgccgcactcggcgcactcgtagggccgctcgcccgtgtggatgcgctggtgctgcagcaggctggaggtgcgcgtgaaggccttgccgcactcgtcgcaagcgtacagtcgctgggccggggggtcggggacaatagggcgaggtcgcgaggtttggccgcactcaggacacactgggggactcttgcccgcctgctgctgctggttggggcggaagcgcttcccgcaccgggcacacggacggggctcctccgtcgcctgcagcctctcctgggggatccgcagggccctccacgcaaaggcctcgccgcacgcgcaagc

SEQ ID NO: 8853 - DNA, 97 bp, homo sapiens; identical to SEQ ID NO: 8844

SEQ ID NO: 8854 - DNA, 108 bp, homo sapiens
tccttccttcttttagatagaactgtactgggattccctcgctccctccctcccttcctcctgccctccctccttccttcttttagatagaactctactgggattccc

SEQ ID NO: 8855 - DNA, 98 bp, homo sapiens
ctggactcttgggtctgagggaggaggggctgggggcctggactcctgggtctgagggaggaggggctgggggcctggactcctgggtctgagggagg

SEQ ID NO: 8856 - DNA, 77 bp, homo sapiens
gctcagccatgaaagggacctggctgctgtgaccccctggatgaatctctcagctcagccatgaaagggacctggct

SEQ ID NO: 8857 - DNA, 84 bp, homo sapiens
cacccccaaccccacttccccgtccccaccagccctcacctccatgacacccccacccccacttccccacccccacccccactt

SEQ ID NO: 8858 - DNA, 105 bp, homo sapiens
ggcagagacacacacagagagagggacagagacccagagagagagagggacagagacccagagagaaggggacagagatccagagagaaggggacagagatccag

SEQ ID NO: 8859 - DNA, 89 bp, homo sapiens
gtttacaaacctttagctagagacagagtgctgattggtgcatttttacagagtgctgattggtgcgtttacaaacctttagctagaca

SEQ ID NO: 8860 - DNA, 109 bp, homo sapiens
ataaaggaaactccatgtataaatatccctcatctcttacacattgggagagatgtgtaagattccttttatctcttacacataaaggaaattccatgtataaatatcc

SEQ ID NO: 8861 - DNA, 93 bp, homo sapiens
tcaagcaattctcctgcctcagcctcccaagtacctgggattagaggtgggcaccaccacacctgtgttcaagcaattctcctgcctcagcct

SEQ ID NO: 8862 - DNA, 167 bp, homo sapiens
acaaaagtgccaatgcaggcatgctgtgggtgatcaggccacgcttccactcagatggagtggggcaagttccaaagactagtcttactaagtaaagccaagtcaaaaccaggacaaaagtgccaatacaggcatgctgtgggtgatcaggccacgcttccactcag

SEQ ID NO: 8863 - DNA, 127 bp, homo sapiens
gctttgccacaatcatcacacttgtgaggtttctctcctgtatgaattctatgttttgcataggatgaagcttgactgaagaccttgtcacagtcatgatatttgtaaggtttctctccagtatgag

SEQ ID NO: 8864 - DNA, 119 bp, homo sapiens
actggagagaaaccttacagatgtaatgagtgtggcaagaccttcaataggatgttccaccttactagacatcagagaatccatactggacagaaaccatataaatgtgatatatgtgg

SEQ ID NO: 8865 - DNA, 91 bp, homo sapiens
tcaagcattaattgacattagggtcaattcagcattgacttgagtttgtattgacttaacattgagttcaagcattaattgacattagtgt

SEQ ID NO: 8866 - DNA, 96 bp, homo sapiens
tgacatatatgtatgtcatgacatatatacatgtatgtcatgacatatgtatgtcatgatatatatcgtgatatatacatgcatgtcgtgatatat

SEQ ID NO: 8867 - DNA, 80 bp, homo sapiens
tgcagtggcaggatctccactcactgtaactcccacctctgtcgcccaggctggagtgcagtggcaggatctccactcac

SEQ ID NO: 8868 - DNA, 96 bp, homo sapiens
ataagaaagtaccacagcctgggtggctctctatttatttatgcccgtattcatttgccagggccaccataagaaagtaccacagcctgggtggct

SEQ ID NO: 8869 - DNA, 692 bp, homo sapiens
ggtgatttacatgtaatgccccgcccctttcgggatgattacgtgtgcctcgacctttaggtgatttacatgtagtgccccgccccgttcccggtgatttacatgtggtgccccgcccctttcctggtgatttacgagtgccccaccccttttaggtgatttttttttttttttatgtgtgcctctccccttcccaagtgatttacatatgttccccgctcctttcagggtaatttacatgtaatgccccgcccctttccgggtgatttacgagtgcctctccccttctcaagtgatttacatgtgtcccgccccgttccgggtgatttacatgcgtgccctggccctttcccagtgatacttttgtgctgcctctttccgggtgatttacgtgtgtgcctctccccaagtgatttacatgtgtgccctgtccgttttaaggtgatttacatgtggtgccccgcccctttccgggtgatttacctgtgtcccatccctttcccggtgatttacatgtggtgccccgcccctttcccggtgatacctgtgtgccccgcccatgaggggacgtctttaaagaacctggacccgccctcagtccaagtgatttacatttgcggccccgcccctctgggaaacttacgagaacctggcccctcagtccaaatcatttgcatgttcggccccatccc

SEQ ID NO: 8870 - DNA, 724 bp, homo sapiens
aagaaggtactttgtaatattcctcgcccccttaccccccaccgccctgcccccgctcgcccgccttaagaaggtactttgtaatattctcccccacaactttagaaggtactttgtaatattctccccaactttagaaggtactttgtaatattctcccccacaactttagaaggtactttgtaatattctcccctccccttaagaaggtactttgtaatattctcccccacaactttagaaggtactttgtaatattctcccctccccttaagaaggtacttcgaggctgggtgcggtggctcatgtctgtaatcccagcactctggggggccgaggtgggtggatcacgaggtcaggagatcgagaccatcctggctaatgtggtgaaaccccgtctctactaaaaaaatacaaaacaattagctgggcatggtggcgggtgcctgtagtcccagccacttgggagtctgaggcaggagaatggcgtgaacccaggaggcagagcttgcagtgagctgagatcgcgccactgcactccagcctgggcgatagagcaagactctgtctcaaaaaaaaaaaaaaaaaaaaaaaaaaaaagaaggtactttgtaatatttctccccactgccacccaccccccgccaagaaggtactttgtaatatcctccccccaacgccagccccctccacgaccttaagaaggtactttgtaatattctcc

SEQ ID NO: 8871 - DNA, 109 bp, homo sapiens
gtgtgtgtttcagtatgtggtttttccattctgtgtactcacccatgtctgtaactatgagggtgcatgttcacgtgtgtgtgtgtgtgtttcagtgtgtggtttttcc

SEQ ID NO: 8872 - DNA, 90 bp, homo sapiens
gttagcacagattttaggcatctcgtgttcggataaaaatacatgaaaagtctttcacgttagcacagattttaggcatcttgtgttcgg

SEQ ID NO: 8873 - DNA, 87 bp, homo sapiens
gctagctgcttgtctagctaccttatcagcataagcatagatgtgagagacagaagttggaaagctagctgcttgtctagccacctt

SEQ ID NO: 8874 - DNA, 104 bp, homo sapiens
cctccctcccggacagggcggctggccggttagaggggctcctcacttcccattaggggcggccgggcagaggcgcccctcacctcccggacagggcggctggc

SEQ ID NO: 8875 - DNA, 75 bp, homo sapiens
aatgtcatcagttaaggcaggaacaggccattttcgcttcttttgtggtggaatgtcatcagttaaggcacgaac

SEQ ID NO: 8876 - DNA, 60 bp, homo sapiens
tagcccctcctccctcagacccaggagtccaggcccccagcccctcctccctcagaccca

SEQ ID NO: 8877 - DNA, 98 bp, homo sapiens
tccctcaaatacctacacagctccctccccagggtctccacacacagagctcccatcatccagagcacccttccctcaaatacctacacagctccctc

SEQ ID NO: 8878 - DNA, 161 bp, homo sapiens
ccaggagtccaggcccccagcccctcctccctcagacccaggagtccagatcccccagcccctcctccctcagacccaggagtccagacccccagcccctcctccctcagacccaggagtccaggcctccagctcctcctccctcagatccagggatccag

SEQ ID NO: 8879 - DNA, 103 bp, homo sapiens
cactgtcccaatcccactcaggcccacctccagctggcctcactccgctggtgacttcgtacctgctcaggagcccccactgtcccagtcccactcaggccca

SEQ ID NO: 8880 - DNA, 73 bp, homo sapiens
ccctggggaaggtggcggcaggtaccgagagccacgcggaggtctgagaccctggggaaggtggcggcaggta

SEQ ID NO: 8881 - DNA, 158 bp, homo sapiens
aggaggctctagctatcctctcattacctggggagaggtgagtcacctgcatgcattgatcatagtccttcatgtgtgtgattccaactggccatctcgattctttaaggaggctctagctatcctctcattacctggggagaggtgagtcacctgca

SEQ ID NO: 8882 - DNA, 76 bp, homo sapiens
tttcagatcatttattaaattgagagtcagatcccagctgcacatctgtatctttcagatcatttattaaattagg

SEQ ID NO: 8883 - DNA, 98 bp, homo sapiens
tttctgtagctgggtcttatggtaggagcgtacccggttgttaaccctccatgatctttacacagagcccctacttttctgtagctggatcttatggt

SEQ ID NO: 8884 - DNA, 185 bp, homo sapiens
tacctgtgtatgtgtctattgaaagcagaagttgtcaaactttacatagtagcaatgaatgtatatgtgtgtgtgtgtgtctattgaaagcagaagttgtcaaactttacgtagtagcaatgaatgtgtgtgtgtgtgtgtgtgtgtgtgtgtgtgtctattgaaagcagaagttgtcaaccttt

SEQ ID NO: 8885 - DNA, 79 bp, homo sapiens
tggctcacgcctataatcccagcagtctgaaaggccgaggtggggccaggcgcagtggctcacgcctataatcccagca

SEQ ID NO: 8886 - DNA, 74 bp, homo sapiens
gatacagggtaaaaacaagcataggtctattgtaactgctcagctctgccgatacagggtaaaaacaagcatag

SEQ ID NO: 8887 - DNA, 135 bp, homo sapiens
ggggtggcggaagtggaatatccatagacacaaggggtggcggaagtgggatccccatagacacaggggatggcgtaagtgggataccccatagacacagggggtggcggaagtgggatccccatagacacaggg

SEQ ID NO: 8888 - DNA, 99 bp, homo sapiens
gtccttcctcagagtgggcggtacttccacgagagtgcgcagcctttcctcagactgcgcagtccttcctcagagtgcacggtccttcctcagagtggg

SEQ ID NO: 8889 - DNA, 100 bp, homo sapiens
aatctctactaaaaatacaaaattagccaggcgtggtgatgtcctgaccaacatggagaaacctaatctctactaaaaatacaaaattagccagggtgga

SEQ ID NO: 8890 - DNA, 122 bp, homo sapiens
tcttctcttgttactcataagagaacacacagtggagaaaaaccgtataaatgcaaggaatgtggaaaagccttcagtgcgcactcttcccttgttactcataagagaacacacagtggaga

SEQ ID NO: 8891 - DNA, 112 bp, homo sapiens
gttccttttaagacactccacagaaggcctccctcacagcaagtgtaagagatacaacccacagaaagtgagacagttcacgggggttccttttaatacactccacagaagg

SEQ ID NO: 8892 - DNA, 132 bp, homo sapiens
tgttttttttttttttttttgagatggagtctcgctctgttgccaggctggagtgcagtggtgcaatcttggctcactgcaaccctctgtatttttttttttttttttttttttgagacggagtctcgctct

SEQ ID NO: 8893 - DNA, 95 bp, homo sapiens
gacaggcggtaccttcccttctgctgttgacagtgtctactgttctcatatccttgtgcctgtgtacccaatgacaggcggtaccttcccttccg

SEQ ID NO: 8894 - DNA, 88 bp, homo sapiens
agcagctgggatgcagggcgccatgtcccgaggctgcatagagcagggggacccagggccagcagctgggatgcagggctccatgtcc

SEQ ID NO: 8895 - DNA, 92 bp, homo sapiens
tattagcttgcattttcttatgcatccagtgaaccagagattgaatattttgctttttgcatattagtttgcattttcttatgcatccagtg

SEQ ID NO: 8896 - DNA, 108 bp, homo sapiens
gacaactctggggctacaggctggagccaccgtgcggggcctgggattcggactctagttccggtttccacagcgtggacaactctggggttacaggctggagccacc

SEQ ID NO: 8897 - DNA, 92 bp, homo sapiens
ttaaaagcacaaagaattattgcccaagagctatagaggattcttacagagagaaaataagatttaaaagcacaaagaattactgcccaaga

SEQ ID NO: 8898 - DNA, 95 bp, homo sapiens
gctcttgacacaaaccaagtttcgctccagaaaattgacaaccctgagtcccaggcaaacagtggcgctcttgacacaaaccaagttttgctcca

SEQ ID NO: 8899 - DNA, 131 bp, homo sapiens
cttcaagctcttgggagaattgcttgtgctccctattcccttggtggatgatggaggcagctagccgtatctgctgcttttctccttcaagctcttgggagaatcgcttgtgctccctattcccttggtgg

SEQ ID NO: 8900 - DNA, 74 bp, homo sapiens
cttgccttaactgatgacattccaccacaaaagaagtgaaaatggctggtccttgccttaactgatgacattac

SEQ ID NO: 8901 - DNA, 125 bp, homo sapiens
gaagttgtctgctatggtttcaattattccttttgtaaatgggctagtggctccgtttaatgctttttcttaccactttataagcgtcaaaagaagttgtctgctatggcttcaattattccttt

SEQ ID NO: 8902 - DNA, 88 bp, homo sapiens
cccacctaagaggagagcccccacctaaggggagaatcccccacctaaggggagagcccccacctaaggggagaatcccccacctaag

SEQ ID NO: 8903 - DNA, 124 bp, homo sapiens
gactccaacatgccagctgaggaggaaacctttcttccctcctgtccctttgatctttcacctggatggctcagcctgtcctgactccacatgccagctgaggaggaaacctttcttccctcct

SEQ ID NO: 8904 - DNA, 114 bp, homo sapiens
cagagaggttcaattttaagatagagcttaaacatgagactgtattagaacatgagactgtattagaagtgaggacaatgaggcacagagaggttcaattttaagatagagctt

SEQ ID NO: 8905 - DNA, 85 bp, homo sapiens
gttaattatttgatcagtcttctgttgaaattattgttgttgttaattattattgttgttaattatttgatcagtcttctgttga

SEQ ID NO: 8906 - DNA, 82 bp, homo sapiens
tcatcttgtctttgtgtttatacatctctgtgtttatacatcccttgtctttgtgtttatacatccctttgtgtttatacat

SEQ ID NO: 8907 - DNA, 84 bp, homo sapiens
gggcagcagttacctttccttgccccacattcacgatccttccattagagggattcggggcagcagttacctttccttgcccca

SEQ ID NO: 8908 - DNA, 100 bp, homo sapiens
cttaattggctcatggttctgcaggctgtacaggaatgactaggtaatttataaagaaaagagtcttaattggctcatggttctgcaggctgtacaggaa

SEQ ID NO: 8909 - DNA, 106 bp, homo sapiens
cattacctatagggaacaccaattcaaatggcagtagatttctcatctgaaaacatggaggccatctgaaatgttacattacctatagggaacaccagttcaaatg

SEQ ID NO: 8910 - DNA, 129 bp, homo sapiens
tcatttatttgtgcaattatttatttctatcagtctagactaatggacattggtcttaatctatgggaagagatgtgcttcttcatttatttgtgcaattatttatttctatcagtctagactcatgga

SEQ ID NO: 8911 - DNA, 88 bp, homo sapiens
aaaaaagaaagaaaaaagatatagtatttatataatactataatactataatgtctcaaagaaaaaaaagatatagtatttttataat

SEQ ID NO: 8912 - DNA, 99 bp, homo sapiens
agggccgaggttccaggcttgagggtggagtttagctgggaacccagacctgcagggtcagctgctttcacttagggccaaggttccaggcttgagggt

SEQ ID NO: 8913 - DNA, 103 bp, homo sapiens
agtttaatttttgaatgggtaatacaaataaaaaacaaaaataaaaataaattaaaaataaaaatatacagtatttcgagtttaatctttgaatgggtaatac

SEQ ID NO: 8914 - DNA, 123 bp, homo sapiens
gaacataaattgtgaagatttcatggacatttgttagttctccaaattaatactttcataatttcttaggcctgtctttactgcaatctctgaacataaattgtgaagatttcatggacattt

SEQ ID NO: 8915 - DNA, 83 bp, homo sapiens
gaccagcctggccaacatggtgaaacctcgtgtctactaaaaatacaaaaaaatcggaccagcctggccaacatggtgaaacc

SEQ ID NO: 8916 - DNA, 87 bp, homo sapiens
ttaacagcatcccaggcagagggaattcccgttctaaatcagtggtcagaatagtggttatcttttaagagcatcccaggcagaggg

SEQ ID NO: 8917 - DNA, 87 bp, homo sapiens
attacatattagatctatattatatctaatatagatctaatatattagattataattagattatattaaattataattatatattag

SEQ ID NO: 8918 - DNA, 103 bp, homo sapiens
tatctaaatatccctggttgagacaaaagtcaatcttcttgagacagtatgaagtgtatctgcttcttgttatctaaatatccctggttgagacaaaagtcaa

SEQ ID NO: 8919 - DNA, 114 bp, homo sapiens
atttgtttgacatcattggacaactaaggtaaaatgcagcaaaccaatcaatttgacttgtattgtttcctgaattgaccatttgtttgacatcattggacaactaaggtaaaa

SEQ ID NO: 8920 - DNA, 124 bp, homo sapiens
aaaaataatcaatggcttagaaacatcacatttatgtgttccaagcaacaacaaggaaggagcatcagtacaatcctaataagtaagcggggaaaaataatcaatggtttagaaacatcacatt

SEQ ID NO: 8921 - DNA, 183 bp, homo sapiens
ggcctcagctcaccagtttcattccctggaaatagaagatccagggatggtctgctatttaaacacaaggcctcagctcaccagcttcattccctggaaacagatgatccagagatgatctgctatttaaacaccacagggcctcagctcaccagcttcattccctggagacagatgatccag

SEQ ID NO: 8922 - DNA, 92 bp, homo sapiens
tttacaaacctttagctagacacagagcgctgattggtgcatttttacagagtgccgattggtgcatttacaatcctttagctagacacaga

SEQ ID NO: 8923 - DNA, 83 bp, homo sapiens
tctaaaccctccaaggctgacatagtgcagtcgaaagaagtgggctgacataaagtgcgtctaaaccctccagggctgacata

SEQ ID NO: 8924 - DNA, 116 bp, homo sapiens
tggggaaagctagattaagaatacactgctctttcttcaagatcctggttgtgatagtgtactatagttttgcaagatgttggggaaagctagattaagaatacactgctctttct

SEQ ID NO: 8925 - DNA, 91 bp, homo sapiens
taactataagagcttttataatagctcttataggtttttatagtagctcttataggttttaaccataactgtaagagcttttataatagct

SEQ ID NO: 8926 - DNA, 101 bp, homo sapiens
ataaaatttgtattaaaatgtaactcagagaaaagatacacattatatttgtatttaatacaaatataaaatttgtattaaaatgtaactcagagaaaaga

SEQ ID NO: 8927 - DNA, 99 bp, homo sapiens
ccctgaccccagaggagctggctccagataaatgtaataaatgtaacctgcatgatgatgtgaaaaccattttctccctgaccccagagaagctggctc

SEQ ID NO: 8928 - DNA, 82 bp, homo sapiens
gcagagaggagctaccctctctgctgagagctgaacactcattgggacgacctgcctagcagagaggagctaccccctctgc

SEQ ID NO: 8929 - DNA, 126 bp, homo sapiens
gtttaggtctttcaagaaatttgtccatttcatatatatttgtccatttcatatacgttggctatcatttttttgagttaacttttgtggtttaggtctttcaagaaatctgtccatttcatatat

SEQ ID NO: 8930 - DNA, 120 bp, homo sapiens
attcatgttactgcaaatgacaggatttcattaattttatggctgaatactattccattatatatatatactatatatgtatgtatacattcatgttactgcaaatgacaggatttcatt

SEQ ID NO: 8931 - DNA, 88 bp, homo sapiens
ggacttgccactaagggtgaaggagaaggggttgaggggtacttgccactcccccagaaaagtgggacttgccgctaagggtgaagga

SEQ ID NO: 8932 - DNA, 92 bp, homo sapiens
tgaagctttcccactcccctgcctggacacacctgaagggcacacctgaagctttcctctgttttattataaagctttcccactcccctgcc

SEQ ID NO: 8933 - DNA, 93 bp, homo sapiens
ggtgtcagaccacacagggacgcttactcactgcagggacgcctctctgatcattcacccacgtttcaagggtgtcagaccacgcagggacgc

SEQ ID NO: 8934 - DNA, 110 bp, homo sapiens
gaatcttttgttctaatatttggtctctgtcctggttcctgagacagggaccctaatacccttgtagattggggtgatctaggggaatcttttgttctaatatttggtct

SEQ ID NO: 8935 - DNA, 88 bp, homo sapiens
tctagaaggtttttaatttacttgacccagatttcaaaagcaacaaatcctgatggagaaggttttctaaaggtttttaatttacttg

SEQ ID NO: 8936 - DNA, 138 bp, homo sapiens
catttaaagcctgcctggataatccaggataatctcccctcttctgtctatgtcaaatctctctctgcctctctcttataaggacacctgtgattgcatttaaagcctgcctggataatccaggataatctcccctct

SEQ ID NO: 8937 - DNA, 85 bp, homo sapiens
gcctgttttcctccctctagcttcattctatagccttggaaggttcgtcctggcctgttcaagcctgttttcctctctctagctt

SEQ ID NO: 8938 - DNA, 107 bp, homo sapiens
tcattctactatatgcaatcctgaaatatgagaataggtatatttaacttgttaggtaatttaatgaaatatatttgctgatatcattctactatatacaatcctga

SEQ ID NO: 8939 - DNA, 150 bp, homo sapiens
agggttcctgcccctcccctagaaaagtgggacttgccactaagggtgaaggtgaaggggttgaggggttcttgcctctcccccagaaaagcggagaaggggtagagacacagagaaggggttggggttcttgcccctcccccagaaaag

SEQ ID NO: 8940 - DNA, 115 bp, homo sapiens
attggttatatcaagaggtatgactatatataaatgtattacaaatagttattgaaacacattgttacaatagttattattggttatatcaagaggtatgactatatatgaatgt

SEQ ID NO: 8941 - DNA, 171 bp, homo sapiens
atatatatctgtaggtgtgtgctatctatatgtatgtatatatgtatgtatgcacatacaaatatatgggtgtatatatatctgtaggtatgtgctatgtatatgtatgtatgcatctatttacttatctaatcacacagacatatatgtatatatgtatatgtgtgtata

SEQ ID NO: 8942 - DNA, 106 bp, homo sapiens
gctctgcatattaaatgactgatcctagaaccaatgaggggctctgcatgttaaataactgaccccagaaacaatgaggtgctctgcatattaaatgactgaccct

SEQ ID NO: 8943 - DNA, 105 bp, homo sapiens
taaatataaataaataaataaatccacaaccaggcccatcatagtaaataaataaataatagaaataaatataaatattataaataatataaataaatccacaac

SEQ ID NO: 8944 - DNA, 108 bp, homo sapiens
aaagtattggtggataacccaaaatagaataactgaataaataaataaatgggggattcagattcactttgaaaaataaaataaagtattggtgggtaacccaaaata

SEQ ID NO: 8945 - DNA, 103 bp, homo sapiens
taggatttgctatgttgtaggtgcccaataaaggtaaaacactaaaggtgcccaataaaggtaagatgtaggatttgctatgttgtaggtgccaaataaaggt

SEQ ID NO: 8946 - DNA, 91 bp, homo sapiens
agggcctcctccctgctgagagcagcagatgtggggaagaccagtagcagagaggagctactctctccagggcctcctctctgctgagagc

SEQ ID NO: 8947 - DNA, 105 bp, homo sapiens
aagcctcatagtgtgtatttcttttagaatattggcttctaggcctatcctagacctactgaatcaaaatctttagggataagcctcatagtgtgtatttctttt

SEQ ID NO: 8948 - DNA, 145 bp, homo sapiens
cagttgtgacagagactggccagaagcattcaccatccatccccgacagaaacagttcacccggtgttaacgggcacttttgcccactgtggcagagctgagcagttgtgacagagactggccagaagcattcaccatccatccc

SEQ ID NO: 8949 - DNA, 71 bp, homo sapiens
gggggtcagcccccacccggccaaacaccccgtctgggagggaggtgggggggtcagcccccgcccggcca

SEQ ID NO: 8950 - DNA, 73 bp, homo sapiens
gtggggacttggagaacctttgtatggacactctgtatctagctaatctagtggggacgtggagaacctttgt

SEQ ID NO: 8951 - DNA, 75 bp, homo sapiens
tcacatggacctttgaacctaaaataaagggcctttattacaaggcctttatcacaaggacctttgaacctaaaa

SEQ ID NO: 8952 - DNA, 92 bp, homo sapiens
aagtttcatcacaactgccatgctcaaacacctacacagtgtggacactctgaaacctgggtggaagtttcatcacaactgccatgctcaaa

SEQ ID NO: 8953 - DNA, 63 bp, homo sapiens
gttggaagagtttagagggctcagtcacaggggtggaaggttggaagagtttagaggttggaa

SEQ ID NO: 8954 - DNA, 93 bp, homo sapiens
tcctcctctcctgctgggttaggagaggtctgtttgggggatgtgtggccctgttagcctccagcatcctcctctccttctgggttaggagag

SEQ ID NO: 8955 - DNA, 177 bp, homo sapiens
aattaccttaataccggaactgcacaattaccttaataccggaaatgcacataattaccttaataccggaactgcacataattaccttaataccagaactgcataattaccttaataccggaactgcacatagaattctgtctatgaagtcagaattaccttaataccggaactgca

SEQ ID NO: 8956 - DNA, 90 bp, homo sapiens
acctccatcagaccaactcagaggcagctttgcgggtgcactgagggatggggagggcacctccatcagaccaactcagaggcagctttg

SEQ ID NO: 8957 - DNA, 98 bp, homo sapiens
tgtaggcatataaagtaattattaataggtatgtacttattttttgtaatttggcatatatattatatttgtaggcatataaagtaattattaatagg

SEQ ID NO: 8958 - DNA, 94 bp, homo sapiens
aaatgtaggggccttgtctgattatctccttgtatctccatgataagcaaagtgaccagcacaaaatgtaggggccttgtctgattatcccttt

SEQ ID NO: 8959 - DNA, 92 bp, homo sapiens
acgatggctccccagccttcctagctgttgggggtggggtgcagcggctgtggccccgggctgagacgatggctccccagccttcctggctg

SEQ ID NO: 8960 - DNA, 93 bp, homo sapiens
caacatggcaaaaccccatcgctacaaaaagacttgagctcaggagttcaagaccagcctggacaacatggcaaaaccccatcgctacaaaaa

SEQ ID NO: 8961 - DNA, 121 bp, homo sapiens
tacatgtgtgcatgtgagtttgtgtgcgcacgcttttgtgcgtgtgcctgcgtgtgtacacgtgtacatgtgtgcatgtgagtttgtgtgcacgtgcttctgtgcatatgcctgcgtgtgt

SEQ ID NO: 8962 - DNA, 88 bp, homo sapiens
tatgggcccatgttggtaacacatttggctctgttaggacatgtggatgcttctaaactatgggcccatgttggtaccacatttggct

SEQ ID NO: 8963 - DNA, 106 bp, homo sapiens
gtgagtgaaactattccaatcagcagggtccagggactgttgcgtgttcttgggcaagaggtgtttctgctgctgcatctgtgagtgcaactattccaatcagcag

SEQ ID NO: 8964 - DNA, 130 bp, homo sapiens
cagaccccagggctcagctcataacaggggaatgtgaattcaaagtcatgagctaatatgctgtgcagtcaggacctggatgtgcagacagactccagggctcagctcataacaggggaatgtgaattca

SEQ ID NO: 8965 - DNA, 99 bp, homo sapiens
gtgttccacttagcataatgtccttcaggattcctcatgtcatgtatgtagatgtgttcttgtgtgtagctgtgttcacttagcataatgtccttcagg

SEQ ID NO: 8966 - DNA, 100 bp, homo sapiens
gtggggtcctcgcctggggccacctgatgagtgctcgggatgaggtcagactcgggcatcccagggtggggtcctcgcctggggccacctgatgagtgct

SEQ ID NO: 8967 - DNA, 100 bp, homo sapiens
agccacgatggtgagggtggcaatcaaaacacccagaaacagggaaccagagactgacaggcaggcagatgcccaaagccacgatggtgagggtgacaat

SEQ ID NO: 8968 - DNA, 92 bp, homo sapiens
tagtgttggccttcaggctttcctcctcccgctccgccacccccagtcgtcagttgttgcatcgtcttctattgttggccttcaggctttcc

SEQ ID NO: 8969 - DNA, 104 bp, homo sapiens
ctctctctctccctcctctccctctccctctctttccacggtctccctctccctctcccctcctctccctctccctctctctctctttccacggtctccctctc

SEQ ID NO: 8970 - DNA, 93 bp, homo sapiens
ggaccaatcagaggctgaagtgaaattttggcccaagaccaatcaggggctgaagtgaaagtttggcccaggaccaatcagaggctgaagtga

SEQ ID NO: 8971 - DNA, 93 bp, homo sapiens
tcacttcagcctctgattggtcctgggccaaactttcacttcagcccctgattggtcttgggccaaaatttcacttcagcctctgattggtcc

SEQ ID NO: 8972 - DNA, 148 bp, homo sapiens
tttctcagaatgcttctgtgtagtttttatgtgaagatatttccttttccacaatgggcctcaaagcgctctatgagatgaatgcacacgtcaaaagacatttctcagaatgcttctgtgtagtttttatgtgaaaatatttcctttt

SEQ ID NO: 8973 - DNA, 119 bp, homo sapiens
ctagtttttatgtgaagatatttccttttccaccataggcctaaaaacgattgcacacatcacaaagaagtttcccaggattcttctacctagtttttatttgaagatatttccttttc

SEQ ID NO: 8974 - DNA, 129 bp, homo sapiens
ctagtttttatgtgaagatatttccttttccaccataggcctaaaaacgattgcacacatcacaaagaagtttcccaggattcttctacctagtttttatttgaagatatttccttttccaccataggc

SEQ ID NO: 8975 - DNA, 94 bp, homo sapiens
ccagatttttacacacttaccttattgaagcctcatcacatccccgtcttttaaattacaggattattcccagatttttaaacacttaccttat

SEQ ID NO: 8976 - DNA, 87 bp, homo sapiens
tggattttgtcaaatgctttttctatgtcaattttgctgagggttttaagcataaagggatgatggattttgtcaaatcctttttct

SEQ ID NO: 8977 - DNA, 101 bp, homo sapiens
atggggcctgctgggaggtggctggtccatgggagcagcttccagtggttcccactgtaggagatggggcctgctgggaggtggctggtccatgggagcag

SEQ ID NO: 8978 - DNA, 96 bp, homo sapiens
aataaggtaagtgtgtaaaaatctgggaataatgcctgtaatttaaaagacggcgttgtgatgaggcttcaataaggtaagtgtgtaaaaatctgg

SEQ ID NO: 8979 - DNA, 111 bp, homo sapiens
gttttaaagaagatatagagaaagaggcaggggaggatctagaaaatagcctcacaaagacagatctaagagttattggttttaaagaagatgtagagaaagaggcagggg

SEQ ID NO: 8980 - DNA, 453 bp, homo sapiens
tttttttttttttaaaagatgaggtcttgctatgttgctcaggctggtcttaagtgatcttcctacctcagccttgctgggataacatgcatcagccactgtacccagctaactttcattctttgttttttttttttttttttttttttttgagatggagtctcgatctgttgcccaggctggagtacaagtccttcattgcaagaactttcattctttttcttttctttcttcctttttttttttttttgagatggagtctcgctctgttgcccaggctggagtgcagtggcgccatctcggctcactgcaagctttgcctcctgggttcatgccattctcccgcctcagtctcccgagtggctgggactacaggcgcctgccaccaagcccggctaatttttttgtatttttagtagagatggagtttcactgtgttagccaggatggtct

SEQ ID NO: 8981 - DNA, 83 bp, homo sapiens
ctgcagtggatattggagcgcttgatgctatgtggttttgaacattcttttcaggatcctgcaggggatattggagcgcttga

SEQ ID NO: 8982 - DNA, 114 bp, homo sapiens
agcgttttgaggcctatggtggaaaaggaaatatcttcactgaaacactctttttctagaatctgaacgtggatatttggagcgttttgaggcctatagtggaaaaggaaatat

SEQ ID NO: 8983 - DNA, 82 bp, homo sapiens
attcattagaatttactcttcttagacatccagtttgatgattatggataaattatattcattagaatttacccttcttaga

SEQ ID NO: 8984 - DNA, 95 bp, homo sapiens
ccagatttttacacacttaccttattgaagcctcatcacaaccccgtcttttaaattacagggattattcccagatttttaaacacttaccttat

SEQ ID NO: 8985 - DNA, 102 bp, homo sapiens
tgcatgatatcacccaaatatttatgaaaacacttgtgtggccagagaccccagatatctaaaccaaagcatggggaatgcatgacatcacccaaatattta

SEQ ID NO: 8986 - DNA, 94 bp, homo sapiens; identical to SEQ ID NO: 1217

SEQ ID NO: 8987 - DNA, 116 bp, homo sapiens
tcttagatctgtctttctgaggctattttctagatcctcccctgcctctttctctacatcttctttaaaacaaataattcttagatctgtctttgtgaggctattttctagatcct

SEQ ID NO: 8988 - DNA, 103 bp, homo sapiens
tcagaatgcttctgtgtagtttttatttagataggttcaacacactgagttgaaggcacgtatcccaaagaaggttttcagaatgcttctgtgcagtttttat

SEQ ID NO: 8989 - DNA, 138 bp, homo sapiens
tgatgtatttcaaatcatacgattatttttatttacattcctcactaacatctgacctcatgaaaaacattgacatattttatttttgtatagttgatgtatttcaaatcatacgattatttttatttacatttctca

SEQ ID NO: 8990 - DNA, 98 bp, homo sapiens
atacatgtataaccttactgttccagaaaagcaagaccctgtctcaatcaatcaatcaatcaatcagtcaatacatgtataaccttactgttccagaa

SEQ ID NO: 8991 - DNA, 115 bp, homo sapiens
tggctcgtgcctgtaatcccagcactttcggaggccgaggcgggtggatcacaaggtcaagagatcgagactgagggctgggcacgatggctcatgcctgtaatcccagcacttt

SEQ ID NO: 8992 - DNA, 126 bp, homo sapiens
taagtattttattttattttaaaatacctggctaattttgtatttaattttatattgtatttattttatttgtaataaaattaagcattttattttattttaaaatacctggctaattttgtattt

SEQ ID NO: 8993 - DNA, 85 bp, homo sapiens
tccccacgcatcccagctcccagccaaacagctgcccagtgccagggctatgtggaagctccccacgcatcccagatcccagcca

SEQ ID NO: 8994 - DNA, 91 bp, homo sapiens
cactgcactccagcctgggtgacaaagcaagactccatctcaaaaaaaaaaaaaaaaaaaaagtgtggcactgcacaccagcctgggtgac

SEQ ID NO: 8995 - DNA, 108 bp, homo sapiens
agcaatactctgtagatagagatagatagatagatagatagatagatagatagatagatagatagatagatagatgacagagcaatactctgtagatagatatagata

SEQ ID NO: 8996 - DNA, 105 bp, homo sapiens
gggtgcagctacagctgcccaagtcatggctgcagactcaggcctcccactccacggagcaggcaggaggcctaccctcacgggtgcagctacagctgcccaagt

SEQ ID NO: 8997 - DNA, 95 bp, homo sapiens
agcatataccttatattatattccttattttgtatatatatgtatgtatatatacacactctcaaattacattatattccttattttatatatat

SEQ ID NO: 8998 - DNA, 96 bp, homo sapiens
tgatctcggctcaccgcaacctccacccaggaaaattttgctcgacacccaggctggagtgcagtggcatgatctcggctcaccgcaacctccacc

SEQ ID NO: 8999 - DNA, 89 bp, homo sapiens
gttaacagatccaaaattatattcagctaggaactggtgctgggatttgaaccagaacagttaacagatccaaaattatattcagctag

SEQ ID NO: 9000 - DNA, 124 bp, homo sapiens
tttttttttttcagaaatctgacaagagaaggaaagttagggttgaactaagggctcttctgctgataagctgtcccttcagaacgggattttttttttccagaaatctgacaagagaaggaaa

SEQ ID NO: 9001 - DNA, 94 bp, homo sapiens
gcaccaatcagtgctctgtgtctagctagaggattgtaaatgcaccaatcagcattctgtaaaaacgcaccaatcagcgctctgtgtctagcta

SEQ ID NO: 9002 - DNA, 108 bp, homo sapiens
ttattatactttaagttctagggtacatgtgcacagcatgcaggtttgttacatatgtttttttaaaatttttttattatactttaagttctagggtacatgtgcaca

SEQ ID NO: 9003 - DNA, 72 bp, homo sapiens
ggaaagtaaccataactagagccctgtaaggccaagtttttcatcacaaggaaagtaaccataattagagcc

SEQ ID NO: 9004 - DNA, 84 bp, homo sapiens
taaattaactagttaagatttagcatgatgactataatagtttttgcaaattatttacttttaaattaaccagttaagatttag

SEQ ID NO: 9005 - DNA, 109 bp, homo sapiens
gaaagtagaatgtgggttgccagggcctggtgggaggagggaagggggatagggtagtcgaattcacagagttggaaagtagaatgtgggttgccagggcctggaggga

SEQ ID NO: 9006 - DNA, 95 bp, homo sapiens
ttctcttccatccacaatatgggcatgttatattggggtgcccaagggccccactttgcaccattctcttccatccacaatatgggcatgttata

SEQ ID NO: 9007 - DNA, 123 bp, homo sapiens
gaacataaattgtgaagatttcatggacatttgttagttctccaaattaatacttttacaatttcttatgccagtctttactgcaatctctgaacataaattgtgaagatttcatggacattt

SEQ ID NO: 9008 - DNA, 81 bp, homo sapiens
cctggatccagctatacctgaaggagatggtgtgccagacctcactggatgagcacctagatccagctatacctgaaggag

SEQ ID NO: 9009 - DNA, 91 bp, homo sapiens
tttaaatttatggaaaaaaaagcaaattttgttctctattttgtatttgcctgggatacatttatagtttaaatttattggaaaaaaaagc

SEQ ID NO: 9010 - DNA, 70 bp, homo sapiens
cctgtaatcccagcactttgtaatcctaacactctgtaattccagcaactgcaatcccagtagcttgtaa

SEQ ID NO: 9011 - DNA, 92 bp, homo sapiens
aaaagaaaaagaacgagagagcttggagtaaaaaaaaaaaaaaaaaaaaaaaaaggaaaagaaaaaagaaaaagaccgagagagcttggagt

SEQ ID NO: 9012 - DNA, 82 bp, homo sapiens
gaagggaaggaggccaagtacaggaaacaccagagccaggcgggatgctagatagggaagggaaggaggccaagtacaggaa

SEQ ID NO: 9013 - DNA, 110 bp, homo sapiens
gtttcctattgctgctataacaaatcacataagcttatctatcatctctctctctgtctctctctctcatttatattagttttctattgctgctataacaaatcacataa

SEQ ID NO: 9014 - DNA, 94 bp, homo sapiens
tagctgggaaatcacttcctggggcagtgagggtcttagctaggaaatcatttcctgggggcaatgggccatagctaggaaatcacttcctggg

SEQ ID NO: 9015 - DNA, 118 bp, homo sapiens
attgggagagaaggatagagggagaagggaagagagagaggcatttgcttacatcatgtctgatttcaagctagcaaccgtttagtgattgggagagaaggatagagggagaagggaa

SEQ ID NO: 9016 - DNA, 92 bp, homo sapiens
ggaccctggagccatgttgaatataaacttcatgtttatattccttgtcttactgccctggcttggaccctggagccatgctgaatataaac

SEQ ID NO: 9017 - DNA, 186 bp, homo sapiens
agctagatacagagtgtcgattggtgcactcacaaaccttgagctaaacaccgggtgctgattggtgtgtttacaaaccttgagctagatacagagtgccgattggtgtatttacaatccctgagctagacataaaggttctccaaggccccaccagagcagctagatacagagtgtcgattggtg

SEQ ID NO: 9018 - DNA, 83 bp, homo sapiens
ggttgtggagagacagattaaggtaaggagagaaggttgtaaaataagacaggaaggggttgtggagagacagattaaggtaa

SEQ ID NO: 9019 - DNA, 81 bp, homo sapiens
caagtctctaggaaattccaaactttcccacatcttcctgtcttctgagccctccaagtctctaggaagttccaaactttc

SEQ ID NO: 9020 - DNA, 103 bp, homo sapiens
aggccaagagtttaagaccagcctggccaacacggtgaaaccccatctctactgaaaatatgaaaattagccaggccaagagtttgagaccagcctggccaac

SEQ ID NO: 9021 - DNA, 114 bp, homo sapiens
tttagatcaaacattcagctgcagaaatagaggtatttgagctgggacaagcatcccaggcagggaggctagcacacataaaggtgtttagatcaaacattcagctgcagaaat

SEQ ID NO: 9022 - DNA, 113 bp, homo sapiens
acaggagaattgcttgaacccaggaggcagaggttgcagtgagacaggagcatcacttgaacccaggaagtggaggttgcagtgaaacaggagaattgcttgaacccaggagg

SEQ ID NO: 9023 - DNA, 112 bp, homo sapiens
acacctgtaatcccagcagtttgggaggctgaggcgggcggatcacgaggtcaagagatcaagactggccggcacggtggctgacacctgtaatcccagcactttgggaggc

SEQ ID NO: 9024 - DNA, 130 bp, homo sapiens
cagtggctctacttcttcccctctccacccaccccccttctctctctctctgggtcggtctctctctgtctctctctctctctcagtggctgtacttcttcccctctccacccaccccccttctctctct

SEQ ID NO: 9025 - DNA, 108 bp, homo sapiens
caccaatcggcactctgtatctagctcaaggtgtgtaaacacaccaatcagcaccctgtgtctagctcagggtttgtgaacgcaccaatcgacactctgtatctagct

SEQ ID NO: 9026 - DNA, 127 bp, homo sapiens
ggggtctccatgtcacccaggctggtgagcaatggcgtgatcatggctccttccttcttccctcccttcctcccttcctcccttccttcacggggtctccatgtcacccaggctggagagcaatggc

SEQ ID NO: 9027 - DNA, 129 bp, homo sapiens
ctcacctcccagacggggcagctggccaggcggggcgctgacccccccacctccttcccggacggggtggctggccgggcggggggctgacccccccacctccctcccgggtggggcggctggccgggt

SEQ ID NO: 9028 - DNA, 75 bp, homo sapiens
gttcctgccttaactgatgacattccaccacgaaagaagtgaaaatggcctgttcctgccttaattgatgacatt

SEQ ID NO: 9029 - DNA, 90 bp, homo sapiens
tatgagggttctcatctgggacacaggtttgccacacctgagaacaggtgtaagcctgtactgtttgtatgagggttttcatctgggaca

SEQ ID NO: 9030 - DNA, 95 bp, homo sapiens
atgtcagcaagctgttcctgtaaaggaatcaggatagcaaagtcctgcttctgcctttttctagaacaaatgtcagcaagctgttcctgaaaagg

SEQ ID NO: 9031 - DNA, 80 bp, homo sapiens
tttttttttaaggtaaaaaactgggattttgaatacaatgttaaatttgtctttttttttttttaaggtaaaaaactggg

SEQ ID NO: 9032 - DNA, 110 bp, homo sapiens
ctttaatccaattaaaatcagtttttgatgcatgacgtcatgagtaggtgtaattagattctttctcccttttaataattaaatctttaatccaaataaaatcagttttt

SEQ ID NO: 9033 - DNA, 101 bp, homo sapiens
agaggaggccctggagtgggaagctcctctttgcatgcaggtggtcacattgtctctgcagctctcagcagagaggaggccctggagtgggtagctcctct

SEQ ID NO: 9034 - DNA, 112 bp, homo sapiens
tgtcccatgagaaggttaccactgtggacacctggatctcaattctgatggggacagggcagaccatgcttcagtgtatgtcccatgagaaggttaccactgtggacacctg

SEQ ID NO: 9035 - DNA, 81 bp, homo sapiens
gtctctactaacaaatacaaaaattgagaccatcctggctaacacggtgaaaccccgtctctactaaaaaatacaaaaatt

SEQ ID NO: 9036 - DNA, 102 bp, homo sapiens
agagagaaaggagagaaaagagagcctttgaggccgaggagaaagaaagaaagaaagaaagaaagaaagaaagaaagaaagaaagaaagaaagaaagaaaga

SEQ ID NO: 9037 - DNA, 108 bp, homo sapiens
ccgcccctccacccccggaagcagatgaagcagatgacagaatttatttgaactgactgctgaatggaacagactcacgaccccgcccctccacccccggaaacagat

SEQ ID NO: 9038 - DNA, 110 bp, homo sapiens
ctgagagcttctatgaaggagggacccgcacatgggtcccaattgtaacaaacaggttacccaagggtcattcatggatgtggcctgagagcttctctgaaggagggacc

SEQ ID NO: 9039 - DNA, 139 bp, homo sapiens
aaaaccctgtctctacaaaacaaaaacaaaacatttagctgggtggacagattgcttgagctcaggagttcgagaccagcctgggcaacacaacaaaaccctgtctctacaaaacaaaaacaaaacatttagctgggtg

SEQ ID NO: 9040 - DNA, 240 bp, homo sapiens
ccttccttcccttcctccctccctctttctattttcttttctttctttctttctttctttctttctttctttctttctttctttctttcttccttccttccttccttcctttctttctttctctctctttctctctttctccctctctctctctttctctctctctctctctctttctgtctctgtctccctttctctgtctctctctctttctctctctctctctctctctctctctct

SEQ ID NO: 9041 - DNA, 114 bp, homo sapiens
gcctgtaatcccagcactttggaaggccgaggtgggaaattacgaggttaagagattgagactgccaggcatggtggcgcacgcctgtaatcccagcactttgggaggccgagg

SEQ ID NO: 9042 - DNA, 122 bp, homo sapiens
gtcttgctctgtcgcccaggctggagtgcagtggtgtgatcctgggccaccgtgcccggccatcttccgtttttttttttgagacagggtcttgctctgtcacccaggctggagtgcagtgg

SEQ ID NO: 9043 - DNA, 115 bp, homo sapiens
ggggtttttcaccccctgccccgtccctctcttccccctcaagcctgtcatccaggtagtgagcaaggtacccagtagggggtttttcaccccctgccccatccctctcttcccc

SEQ ID NO: 9044 - DNA, 65 bp, homo sapiens
agagacagaaagtacaatagaagtatactattcgacagaaagtagaatagaaagtagaatagaag

SEQ ID NO: 9045 - DNA, 100 bp, homo sapiens
cttccaacaaggaaggcaagttttcctgcttccatgacgatggagagcacgtaactcccttctggagtttcaactcacttccaacaaggaaggcaagttt

SEQ ID NO: 9046 - DNA, 208 bp, homo sapiens
gcctggctaggtgacagctctcctgtgccatcccctctcttgattaccactcctcccatggcagaatgaagaagcctggctaggtgacagctctcctgtgccatcccccttccaacaaggaaggcaagttttcctgcttccatgacgatggagagcacgtaactcccttctggagtttcaactcacttccaacaaggaaggcaagttt

SEQ ID NO: 9047 - DNA, 77 bp, homo sapiens
tgttgaagaaatatctgcgcttgcacatatcctatggaaatgaatctagtatgttgaagaaatatctgcgcttgcac

SEQ ID NO: 9048 - DNA, 88 bp, homo sapiens
ttttccaaagtgactacaccattttgaactcaactcgttttaggacgtttcaaacagttttccaaagtgactacactattttgaactc

SEQ ID NO: 9049 - DNA, 109 bp, homo sapiens
gttgttgttctccccgaaatcatctccttttatattttctaatacattattatacacacaaatgaaatagaaggcattggttgttgttctccccgaaatcatctccttt

SEQ ID NO: 9050 - DNA, 117 bp, homo sapiens
aattattagaaatacacaattacctctgctaatataaaattacctctgtatgtgtattattagaaatatataatgattagaatattaattattagaaatatacaattacctctgcta

SEQ ID NO: 9051 - DNA, 100 bp, homo sapiens
ggaggatcgcttgagcccaggagttcaagaccagcctgggcaacatagtgacaccccatctttatgaagctgaaacaggaggatggcttgagcccaggag

SEQ ID NO: 9052 - DNA, 97 bp, homo sapiens
ctcccctttatctacactggctcccgcagacccgcgggcaacacagagagtgcttgggactccctcaaacttctctcctttatctacactggctccc

SEQ ID NO: 9053 - DNA, 106 bp, homo sapiens
tgatggcgcgcctgtaatcccagctacttgggaggcgattattactaaaaatacaaaaattagctgggcctgatggcgtgcctgtaatcccagctacttgggaggc

SEQ ID NO: 9054 - DNA, 104 bp, homo sapiens
ttatgtgcattcatttatgcattgtctggcttatgggctagccacttgtttttgtaaataaagctttattagaacagttatgtgcattcatttatgcatcgtct

SEQ ID NO: 9055 - DNA, 92 bp, homo sapiens
gttagcttttatctccctgtcacccctttgcagggttgggagcctatgcatgacttgtggtggttatgtgttagcttttatctccctatcac

SEQ ID NO: 9056 - DNA, 74 bp, homo sapiens
atacacatatgtattagaaagaaatagaaacacatatacatacacacatatataaacacatatattagaaataa

SEQ ID NO: 9057 - DNA, 80 bp, homo sapiens
ctttgtcagcctcgctctctgtgcagctagactgtaagatccaggagagcaagaactttgtcagcctcgctctctgtgca

SEQ ID NO: 9058 - DNA, 156 bp, homo sapiens
ataaatgccattgatgtagaaacgtgccatttatacagaaaattcactattttctataaatgccatttatgtagaaacattcactattttctataaatgatatttatgtagaaacaaggaatatgcaacacataaatgccatttatgtagaaacat

SEQ ID NO: 9059 - DNA, 92 bp, homo sapiens
cttacatatattatttgcttatgtatttttccttccctccttccttctttccttccttccctccctcccttccatatattatttgcttatgt

SEQ ID NO: 9060 - DNA, 104 bp, homo sapiens
tactgtgattttttttcagttttccttctgttattgttttttagttttattccgtggtggttgggaaagatacttaattctgttattattttttagttttattc

SEQ ID NO: 9061 - DNA, 371 bp, homo sapiens
ccagccgatcctgactccggggcaaccccagaagatcccgactccgggacagcaccagccgatcctgactccggggcattcgcagccgatcccgactccggggcagcccctgccgccccagccgatcccgactccggggcggcccctgacgccccagccgatcccgactccggggcggcccctgacgccccagccgatccagatgccggggcggcccctgaggctcccgccgcccctgcggctgctgagacccgggcagcccatgtcgccccagctgcgccagacgcaggggctcccactgccccagccgcttctgccacccgggcagcccaagtccgccgggcggcctctgcagcccctgcctccggggc

SEQ ID NO: 9062 - DNA, 332 bp, homo sapiens
ccctccaggacccctcccttccaggaccctacccgtctgggactcaggccttccctgactcctccctcccggactcacccctcccagatccctcccctccgggaccctctcccctcccgggccccctcccctccgggaacccctcccctcccggactcacccctcccagatccctcccctccaggagcccctcccctctcgggacccctctcctcccggacccaccccttcctgacccctgccctcccggacccctgcgggactagatgtatacagctgagaccatatcacggttctcaccctcgctctaccctcccggacccctgctctcc

SEQ ID NO: 9063 - DNA, 666 bp, homo sapiens
catctccaggtagatgaggatgtctaaggacagatggcgtctccagctagatggtgtctccaggtagacaacaacgtctatgaattgacggtgtctccaggttaacaacaatgtctccaggttaacaacaatgtctccaggtagacaacaatgtctatgaattgatggtgtctccaggttgacaacaatgtctatgaattgatggtgtctccaggttgacaacagtgtctccaggtagacaacaatgtctccaggttaacaacaatgtctatgaaaagacggtgtctccaggtagacaacaatgtctatgaattgatggtgtctccaggttgacaacaatgtttccaggttaacaacaatgtctatgaatagacggtgtctccaggttgacaacaatgcctatgaatagatggtgtctccaggttaacaataatgtctccaggtagacaacaacgtctatgaattgatggtgtctccaggttgacaacaatgtctccaggttaacaacaatgtctataaattgatggtgtctccaggttgacaacaatgtctatgaattgatggtgtctccaggttaacaataatgtctccaggttgacaacaatgtctatgaattgatggtgtctccaggttgacaacaatgtctccaggtagatgatggtgtct

SEQ ID NO: 9064 - DNA, 79 bp, homo sapiens
ttatgtataaaacacctaattcattggaactatttggaggattaactgttattttatgtataaaacacctaattcattg

SEQ ID NO: 9065 - DNA, 102 bp, homo sapiens
aatagagtgaaattagtacaagcaacttaataatgcagctacagaacatatgagttttacagattttccttaaaaaaatagagttaaattagtacaagcaac

SEQ ID NO: 9066 - DNA, 96 bp, homo sapiens
gcaccatgtaatatataattcatatatatgaatatatatgtgaatagcaccatgtaatatataatagcaccatgtaatatgtaattcatatatatg

SEQ ID NO: 9067 - DNA, 85 bp, homo sapiens
caggtaaagagtgagattcaaaagaaaactagttcaggtaaagagtaagaaaaaaactagtccaggtaaagagggagattcaaaa

SEQ ID NO: 9068 - DNA, 140 bp, homo sapiens
ttaattatatcagatgatatattatatgttatatattattttacaatatataatatatgtcatattttatattattttacaatatataatatatgtcatattttatattattttacaatatataatatatgtcatattat

SEQ ID NO: 9069 - DNA, 95 bp, homo sapiens
ggatgaccagctgcagagaggagctactcactccaggacctcctctctgctgagagctgcaaacaatgggatgaccagctgcagagaggagctac

SEQ ID NO: 9070 - DNA, 95 bp, homo sapiens
gcctaacctctctgagcttcctttaggaccacagcatccgctacagcagatgtgtgacctggagcacatggcctaacctctctgagcttccttta

SEQ ID NO: 9071 - DNA, 84 bp, homo sapiens
caagaagtaagagatattgtcccactagcttttgaaggactcatcaggtgagcccttgcaagaagtaagagatattctcccact

SEQ ID NO: 9072 - DNA, 108 bp, homo sapiens
ttccaacattttctttttgaagttttggttttcatagacagaagaagtccttccttccccaagagtcatattttccaacatgttctttttgaagttttggttttcata

SEQ ID NO: 9073 - DNA, 318 bp, homo sapiens
ggaaaaagaatgggtggaggaatggatagagatgtatggatggagggtgaatgggaggatagatggatatatgcatggagaaatggttggggaatggatggagggagggagggtgaatgggaggattgatggacagatgaatggagaaacggatagagggaaggagtgtgaatgggaggattgatggatacatgaatggagaaatggatggggaatggatggagggagggagggtgattgggaggattgatggaagatgaaatggagggagggagggagtgatggataaaggaagggatggatggggggatgaatgga

SEQ ID NO: 9074 - DNA, 74 bp, homo sapiens
catttctgccacccttcccaagctggcctcattctgtctctctggagactccctttctgccacccttcccaagc

SEQ ID NO: 9075 - DNA, 83 bp, homo sapiens
cttcccgtctctggggattctgtttcagtacatttcccccagcttcacgtaagacttcccatctctggggattctgtttcagt

SEQ ID NO: 9076 - DNA, 94 bp, homo sapiens
agcatatccatataaaaatggaaaaacctcagttatccatttccctctcaagttcttaaacatatgacagcatatccatataaaaatgaaaaat

SEQ ID NO: 9077 - DNA, 121 bp, homo sapiens
ggtacatgatgagttgtgtgctccccctcatgctcaaccgaagactaaagaggaagaagtagggtccacctaaagggtacatgatgagttgtgtgctccccctcatgctcaaccgaagact

SEQ ID NO: 9078 - DNA, 102 bp, homo sapiens
ccctttactctaatgtctgcctgaggacgccgcagcccttgctgcaggaccttcctcctcactcacagtctcaccccctttacactaatgtctgcctgagga

SEQ ID NO: 9079 - DNA, 107 bp, homo sapiens
acaccctgccccctggcaaagatctactcatgctatcacctcaaggcatcccctcttccctttccagtcaatgccccgctcgacaccctgccccctggcaaagatct

SEQ ID NO: 9080 - DNA, 106 bp, homo sapiens
gactttctgcctagctagccatgtaccattgcttgtgtacaatttgtgaaccaaaaacttgggttcccgtatctgactttctgcctagctagccgtgtaccattgc

SEQ ID NO: 9081 - DNA, 83 bp, homo sapiens
ggagactgactgcactgatctgcagtgaaaacagactgaggcctctgtcccacccgggagactgactgcactgatctgcagtg

SEQ ID NO: 9082 - DNA, 86 bp, homo sapiens
tgggaggcctcagctgccacagcagtgtgctcggatcctgcagcccttgggtttgctgttgggaggcctcagccgccacagcagtg

SEQ ID NO: 9083 - DNA, 82 bp, homo sapiens
aaacatgaaagtgatggattactgggatatgagtccataaagatgctctaacattaaacatgatagtgatggattactggga

SEQ ID NO: 9084 - DNA, 109 bp, homo sapiens
agactcccagtaaagccctttcctgctgcagcaatgccccctctgtactctcagagagtaacatcctagcagcactgtttctagactcccagtaatgccctttcctgct

SEQ ID NO: 9085 - DNA, 96 bp, homo sapiens
tcagagacacggaagggcaggagcagggggcaggcaggagaggcccatgtcaggaccaataatcccccatgagtcagagacacgggagggcaggag

SEQ ID NO: 9086 - DNA, 84 bp, homo sapiens
tagaaaacacagactcagacagtgcctccatcatgttataaacagtccaaagctcagtctagaaaacacagactcagacagtgc

SEQ ID NO: 9087 - DNA, 74 bp, homo sapiens
tggaagcgagagtgggctttcttcccatgtctcacccaccagtggttaattggaagtgagagtgggctttcttc

SEQ ID NO: 9088 - DNA, 93 bp, homo sapiens
ccactgacccaaccttgagcagcttgaaggggctcccactgacccaaccttgagcagcttgaaggggcttccactgacccaaccttgagcatc

SEQ ID NO: 9089 - DNA, 81 bp, homo sapiens
ggccccacacctggctcttggcactaaggtccttggaggctgccccacgccccctggccccacacctgcctcttggcacta

SEQ ID NO: 9090 - DNA, 120 bp, homo sapiens
attagacaatccttggaactttataactgtgtgcgtatttcaagggatctgttggcttctgagctcttgttctgaggggtgggagaattagacaatccttggaacttgataactgtgtgc

SEQ ID NO: 9091 - DNA, 111 bp, homo sapiens
accagcggctctcactggctgctgcctggcatgagaacttggcatccccaagaccgccttccacctacacagcgaccagcggctctcactggctgctgcctggcataagaa

SEQ ID NO: 9092 - DNA, 115 bp, homo sapiens
gggtcagcccacttcttcctggtgtggcattgcacatgcagcctgtgggtgctcgctggggcatccaaggggcaccaggagagctgggtcagcccacttctccctggtgtggcat

SEQ ID NO: 9093 - DNA, 110 bp, homo sapiens
tgccgtgtctgttgaggtgccgtgcgcagtggctgtgtgcgtgtgtgcagctgcgggtgtgggtgtggccgtgtgctttgccgtgtctgttgaggtgccgtacgcagtgg

SEQ ID NO: 9094 - DNA, 112 bp, homo sapiens
gtgaggcatgtgccttgcggaggcccagctcctggccaccttccccgcccctcccgcaacacgaccataacgaatgtgaggcatgtgccttgcggaggcccagctcctggcc

SEQ ID NO: 9095 - DNA, 90 bp, homo sapiens
gtcttagaatgttattaggccatccgagtagcgttggctgagtcggaggctgtggtggctgccaggtcttagaatgttattaggccatcc

SEQ ID NO: 9096 - DNA, 100 bp, homo sapiens
agcccagcacacagagctcactctgggaagaaggagcttgctggtgggacacccttcactcttctgactgtcagtggagcccagcacacagagctcgctc

SEQ ID NO: 9097 - DNA, 107 bp, homo sapiens
tcctcacgtctgcagttggaattcgcccccctttcggtcacatcattcattgtatgaccagggtcccatgttgctggggtgcatcctcacgtctgcagttggaactc

SEQ ID NO: 9098 - DNA, 99 bp, homo sapiens
actcgctgaccctcagtgagtgcatgtaaaacatgtttttccagaaccgggcagggaccccgaggccagactcgctgaccttcagtgagtgcatgtaaa

SEQ ID NO: 9099 - DNA, 90 bp, homo sapiens
gcgtttcctgtgtgtgtctgtaatcccatcatcaagacagcatatacctcccatcactccctgcgtttcctgtgtgcgtctgtaatccca

SEQ ID NO: 9100 - DNA, 151 bp, homo sapiens
taggaaatgagtttgagacccggtccttcaccttaggaaatgagtttgagacccggtcctccacattaggaaatgagtttgagaccgggtcctccacacaggcatctgtgcacatacactcaggctcagcaggagtttgagaccaggtcct

SEQ ID NO: 9101 - DNA, 96 bp, homo sapiens
gggaagctgaagccaggggagggaaggatgcctggggcccgccagggagaggaggcagggtctgaggtggggaagctgaggccaggggagggaagg

SEQ ID NO: 9102 - DNA, 84 bp, homo sapiens
ggaggggaggggcccctgtcctgccccactgtgagtgcaactggggttgaggggggaggaggggaggggcccctgtcctgcccc

SEQ ID NO: 9103 - DNA, 84 bp, homo sapiens
gagacctacactccaaccccactgagcagaggatggcaggaggcaggaagggggcgtagagacctgcactccaaccccactgag

SEQ ID NO: 9104 - DNA, 99 bp, homo sapiens
tgctgtcttggaggggagaggtctggtgccagggtgggcagagggagcctgggggaccctgggcccttcgtgctgtcttggaggggagaggtctggtgc

SEQ ID NO: 9105 - DNA, 108 bp, homo sapiens
gttagtcccgcctccgtgagtctgtgttggttgtggttcaaagctcgtggggctgtagactgaggggtggatttcagcgcgtgttagtcctgcctccgtgagtctgtg

SEQ ID NO: 9106 - DNA, 93 bp, homo sapiens
tctggaacatgcaagcagaggctggcttcatggaccacagatggccgtgtcagagccttatctggaacatgcaagcagaggctggctccatgg

SEQ ID NO: 9107 - DNA, 94 bp, homo sapiens
aatttttggtagacatgaggcctccctctgtctccaagctggccacgcccggccgatgtttcaatttttggtagagatgaggcctccctctgtc

SEQ ID NO: 9108 - DNA, 98 bp, homo sapiens
gggtcccccaaaggcagggcccaggaccctggaactcgggtcccctgaaggcagggcccagaaccctggaactggggtccccccaaggcagggcccag

SEQ ID NO: 9109 - DNA, 115 bp, homo sapiens
tgagcagatgtcggggagactgggaagtctccagcgttactgctctccttcccttcatgataagccagtgccagcatccagcgtgagcagacgtcggggagactgggaagtctcc

SEQ ID NO: 9110 - DNA, 110 bp, homo sapiens
cgacccacccacaccagctccacacccacacctgtccccgaaccttcccccagcaggcacaggactgcctctggggcccccgacccacccacaccagccccacacccaca

SEQ ID NO: 9111 - DNA, 110 bp, homo sapiens
catcacaggtctcatctgcacagggctccctgcctttccctgtctccacctcccccacccctgcccagtcagccgcatcacaggtcccatctgcacagggctccctgcct

SEQ ID NO: 9112 - DNA, 94 bp, homo sapiens
ctgggctccatgttggcagggcttgcgggggcggtgctgggcttcacagtggcaggacttgcagagggggcctgggctccatggtggcagggct

SEQ ID NO: 9113 - DNA, 198 bp, homo sapiens
ggttttgtggatgtgctaccatctcattggtcagttttgtgaatgtgctgctgtctatttacctgctcattggtcggttttgtggatgtgctaccatctcattggtcagttttgtgaatgtgccactatctatttacctgctcattggtcggttttgtggatgtgccgccgtctcattggttggtggcatttgcgtgg

SEQ ID NO: 9114 - DNA, 150 bp, homo sapiens
tttcaaacagcgggaaccatcttagtccatgggccactgagtgcctggaccaggggttcaggaggttccggacgaggctttatgaaccggatcctcctctttgcatttcaaacagtgggaaccatcttagtccatgggccactgagtgcc

SEQ ID NO: 9115 - DNA, 102 bp, homo sapiens
cctggacaacctcaccacgaagacaggagtgaggaggtgaacgcagtgtggactgaatccacagcctgcctggacaacctcaccacgaagacaggagcgagg

SEQ ID NO: 9116 - DNA, 90 bp, homo sapiens
ggaggcacgtcccaccctggagccatctcgccgggcctctgagagcgaagtgtttggggagacagcaggaggcacgtcccaccccggagc

SEQ ID NO: 9117 - DNA, 95 bp, homo sapiens
cactttatatacaacttaagtttatagcagtataatttcagaggccacttaaaattaatcctgaatcactttatatacaacttaagtttatagca

SEQ ID NO: 9118 - DNA, 103 bp, homo sapiens
gaagcgcagtcaccttccaccgcttccctgaaaccccttttctgccttaggccgggccccaccatggagaagcgcagtcaccttccaccccttccctgaaacc

SEQ ID NO: 9119 - DNA, 79 bp, homo sapiens
aacagcctcggtcagggtgggctcagcaatggcccccaccctgtttcccctgaacagcctcggtcagggtcggctcagc

SEQ ID NO: 9120 - DNA, 123 bp, homo sapiens
ctgtttggccgtccttggcatgtagctgcccttcatcacaggatggcggatctcagccctttatcacaagatggcagaccccaggctgtttggccatccttggcatgtagctgcccttcatca

SEQ ID NO: 9121 - DNA, 101 bp, homo sapiens
cacaggcacgggcatcctgggggaagtccctccagcccggatacgcccacccctgacctgctgggccggggcactggccacaggcatgggcatcctggggg

SEQ ID NO: 9122 - DNA, 86 bp, homo sapiens
tgcccacagcaaaggagctgaggagagcctgggagctcagggaggttcagggagctccgtgcccacagcaaaggagctgaggagag

SEQ ID NO: 9123 - DNA, 144 bp, homo sapiens
cggactcccccagcccaggtgcgttcatagccagactgcttggtcctgaggcctgcgctgctgcagggtgagccccacccggagttcagcacggactcccccagcccaggtgcgttcatagccaggctgcttggtcctgaggcc

SEQ ID NO: 9124 - DNA, 95 bp, homo sapiens
ctcctctgacacggggaaaccgaggcctgatggtaactctcctaactgcctgagaggaaggtggctgcctcctctgacatggggaaaccgaggcc

SEQ ID NO: 9125 - DNA, 105 bp, homo sapiens
aggcccccccacccccaggaacttcccacagtggagaggaggcccaaggccaggcgccctccagggttctgcaggtagcgaggcccccccacccccaggaacttc

SEQ ID NO: 9126 - DNA, 144 bp, homo sapiens
tcggaggggagggtagtgagggaggcctgggatccccctccgacggcacccacgggcatgtgccaccggccgcacccaagctgctcatgtgaaaaggcggtcggaggggagggtagtgagggaggcccgggatccccctccgac

SEQ ID NO: 9127 - DNA, 107 bp, homo sapiens
aggagtggggaggtgggggtgtctgcacctggtccgtgggcctggcccgagccacttccccagggcaccctggcaggtgggaaggagtggggaggtgggggtgtctg

SEQ ID NO: 9128 - DNA, 76 bp, homo sapiens
agggaggagagagagaggaagcgggaagcacgggcacagagagactcggagagagggaggagagagagaggaagcg

SEQ ID NO: 9129 - DNA, 86 bp, homo sapiens
aggaaggagagcaaaaggcagggacggaacagagaaaagccagatgaagacagcacagagagatgggaagagacacagaagaaagg

SEQ ID NO: 9130 - DNA, 82 bp, homo sapiens
tggcttttgcccttgggggttcatcaggtatagggaggggctgtgtcagggccacacgtggcttttgcccttgggggttcat

SEQ ID NO: 9131 - DNA, 115 bp, homo sapiens
ggcctgctgtcaccgagctgctgtcctggggtggggctggccacgctggcctgattctgggcctccctgggggcctgctgtcaccgagctgctgtcctggggtggggctggccac

SEQ ID NO: 9132 - DNA, 132 bp, homo sapiens
gtgtggccatgggcgtgccatgtgggggaagacagaccatctgacctcccgcgaggcagcgacttcccactctagcatggaggtccgtgtggccatgggcgtgccatgtgggcgaagacagaccatctgacc

SEQ ID NO: 9133 - DNA, 97 bp, homo sapiens
tttcccttctctttctcttggagacagagatgctctgaacaactgtggaccttgtgcttatgtcttttcccttctctttctcttggagacagagatg

SEQ ID NO: 9134 - DNA, 128 bp, homo sapiens
tgctgaacagacggtgcggaggccaaggccagatccacacacaaaagtacaggacctcagccttggcaggcaaaggagggacttgctgaacagacggtgcggaggccaaggccagatccacgcacaaa

SEQ ID NO: 9135 - DNA, 146 bp, homo sapiens
aaggaaatatcttcacataaaaactacacagaagcattctgagaaatgtctttttaagtgttcattcatgtcacagagcgctttgaggcccattgtggaaaaggatatatcttcacataaaaactacacagaagcattctgagaaa

SEQ ID NO: 9136 - DNA, 127 bp, homo sapiens
tgataaaagtccatgaaatcttcacaatttatgttcagagattgcagtaaagacaggtgtaagaaattataaaagtattaatttggggaactgataaatgtccatgaaatcttcacaatttatgttc

SEQ ID NO: 9137 - DNA, 154 bp, homo sapiens
gggccttctgcctctctgcgtctgcgccggcgctgtgggcctctctgcgcctgcgccggcgctgtgggcctctctgcgcctgccccggcgctgtgggcctctctgcgcctttcgccagcgctgtgggcctctctgctcctgcgccggcgctgtg

SEQ ID NO: 9138 - DNA, 106 bp, homo sapiens
gtccacttggagcctggagttttcacctggggcctggtagacatctggccccagtaaacatcagcgtggggcctcgttgtccacttagagcctggagttttcacct

SEQ ID NO: 9139 - DNA, 86 bp, homo sapiens
gaggcccagttctgcttctgctcttcccaacagccccttttcagatgttggcactagctggaggcccagctctgcttctgctcttc

SEQ ID NO: 9140 - DNA, 87 bp, homo sapiens
taccctagcatacaaaaatgcttcatctacgatgtatgctgtaactgtgtgtattgtctaccctagcatgcaaaaatgcttcatcta

SEQ ID NO: 9141 - DNA, 110 bp, homo sapiens
actcggtggctgctgagggcccattcatcatagatggagtcttctgtatgtcctcatatggtagcagtaaactcggtgcctgctgagggcccattcatcatagatggagt

SEQ ID NO: 9142 - DNA, 104 bp, homo sapiens
acaggaaagttctccaagtccccaccagattagctagacacagagcgctgatcgatgcagttacaaacctctagctaaacagaaaagttctccaagtccccacc

SEQ ID NO: 9143 - DNA, 93 bp, homo sapiens
tcatgtgattcatttatagagtttctctaacatagcaggttctactcagtgacaacggaaccattctgtgtcatgtgattcacttatagagtt

SEQ ID NO: 9144 - DNA, 139 bp, homo sapiens
aaacaaattaaacctttatagataaccttaaatatctgaatatgtatagagttgaatgatgggacaattgagggaaggggtagacagacattaggaaaaacaaattaaacctttatagataaccttaaatatctgaata

SEQ ID NO: 9145 - DNA, 89 bp, homo sapiens; identical to SEQ ID NO: 6957

SEQ ID NO: 9146 - DNA, 108 bp, homo sapiens
gtttgggcagctgcagctgcacccgggagtggggcaggactcctgcctgctccacggagcgaggctgggtatgcagccctggtttgggcagctgcagcagcacccggg

SEQ ID NO: 9147 - DNA, 81 bp, homo sapiens
tcccatgaaaggcctctcctcttgaccctctatccaattactctttttccacatttttcccatgaaaggactctcctcttg

SEQ ID NO: 9148 - DNA, 76 bp, homo sapiens
attattagagtaatcctggaaaactgtataaatcctggaaaacaggtataattattattagagtaatactggaaaa

SEQ ID NO: 9149 - DNA, 127 bp, homo sapiens; identical to SEQ ID NO: 9136

SEQ ID NO: 9150 - DNA, 102 bp, homo sapiens
gaagtacacattgaatattggtgagctgaagaaagttcagaaatagacacaatggattatgataatttagaatataaggaagtacacattaaatattggtga

SEQ ID NO: 9151 - DNA, 90 bp, homo sapiens
ccgccccaggcgcactggctaggactggaaggcaaggactaaggtgaaagctgactgcccgcaccgccccaggcgcactgggtaggactg

SEQ ID NO: 9152 - DNA, 108 bp, homo sapiens
gaatttgaattcaggcttcttaccataaagttgagtgacttccccaaagtggcacagttaatgggtggataatctggaatttgaattcaggcttcttatcataaagtt

SEQ ID NO: 9153 - DNA, 116 bp, homo sapiens
cctttttcgaattccacattaggttatgaaattctactcttcgggattagaagagtagaatcatatagatgttttccctttttgaattccacattaggttatgaaattctactctt

SEQ ID NO: 9154 - DNA, 94 bp, homo sapiens
agctctcagcagagaggagaccctggagtgggtacctcctctacgcaggcaggtcatcctgtcttctgctgagctctcagtagagaggagaccc

SEQ ID NO: 9155 - DNA, 122 bp, homo sapiens
ttccatgtgagtgctcaccaacgggtgaccttggggaagagatatgtggatggacctctctgagtggtcataactgtgaagatatttgtgttccatgtgagtgctcaccaacgggtgacctt

SEQ ID NO: 9156 - DNA, 113 bp, homo sapiens
tacctgtgataaagtttaatttataaattaggcactatataactatatagtacatatagtttttttcctatatatagtatctacctgtgataaagtttaatttataaattagg

SEQ ID NO: 9157 - DNA, 115 bp, homo sapiens
aaaattgaatataggcaaatattccttatttcactcctagttttacactagtggtcgttagtgtcctagagagaaaagagaaaattgaatataggcaaatattccctatttcact

SEQ ID NO: 9158 - DNA, 87 bp, homo sapiens
ttttctgggggaggggcaagtaccccaaccccttctctccgtgtctctaccccttctccacttttctgggggaggggcaagaacccc

SEQ ID NO: 9159 - DNA, 100 bp, homo sapiens
aatttggaaagtatacaaatacatgaatattttatcaattaataatgtaataaaattataaatcagtaacaagaataatttggaaagtatacaatacata

SEQ ID NO: 9160 - DNA, 82 bp, homo sapiens
gcttttctgggggcaagaaccccccaaccccttctctctgtgtctctaccctttctctgcttttctaggggcaagaaccccc

SEQ ID NO: 9161 - DNA, 81 bp, homo sapiens
tgcccacagcactatgcaaacattgagttaagcccagcatctttgatctataatgcccacagcgctatgcaaacattgagt

SEQ ID NO: 9162 - DNA, 111 bp, homo sapiens
ttaaaaagcctaggtaaggaagagagagaattcatgcatattacattgttacatgttgcttcttcacaagttgttaaaaaggcctaggtaaggaagagagagaattcatgc

SEQ ID NO: 9163 - DNA, 122 bp, homo sapiens
gaacataaattgtgaagatttcatggacattaattagttccccaaattaatacttttataatttcttacgactgtctttactgcaatctctgaacataaattgtgaagatttcatggacatt

SEQ ID NO: 9164 - DNA, 95 bp, homo sapiens
taagtgggaaaaactgatcagaaaatattaaaaagtaaaatgatccagtgactaggaggtatgtaataacataagtgggaaaaactgatcagaaa

SEQ ID NO: 9165 - DNA, 75 bp, homo sapiens
cagaggttgcagtgagccaagatcgtgccactgctctccggcctgggtgacagaggttgcagtgagccgagatcg

SEQ ID NO: 9166 - DNA, 73 bp, homo sapiens
acatatgtatatgttcaccatatatatgtgaacatacacatatattcatacatatgtatatgttcaccatata

SEQ ID NO: 9167 - DNA, 81 bp, homo sapiens
tacgtggccagaggtcaaagatgggcatagattttgtaatttattacctttcatggggtatgtggccagaggtcaaagatg

SEQ ID NO: 9168 - DNA, 97 bp, homo sapiens
caatcatttaaaagggtgtttatatgaaagctacacaattataatattataatcacaacatttaaatggtttccaatcatttaaaaaggtgtttata

SEQ ID NO: 9169 - DNA, 120 bp, homo sapiens
ttctttgtgaaattgaacttagaccttgtccaagcatattatatattcttaataattaagtatatagatacgtgataactacttaattgcttctttgtgaaattgaacttggaccttgtc

SEQ ID NO: 9170 - DNA, 166 bp, homo sapiens
tgaaagaagccaggtatgaaggttacatgttgtgtgaatccatttctggagaatgtccagaataggcaaatgagtagagaatgaagattgttttcaagggaagaagagagacctgaaagaagccaggcatgaaggttacatgttgtgtgaatccatttctggagaa

SEQ ID NO: 9171 - DNA, 79 bp, homo sapiens
tctagcctatgttgaagcaaattcctaataagaaaaatcaagaattatttaaccattctagcctatgtagaagcaaatt

SEQ ID NO: 9172 - DNA, 232 bp, homo sapiens
cctctccagtgcccctctctgctgccagcagcagatgtcgggatgaccaatggcagagaggagccatccactccaggcctcctctctgctgtcagctgcagagacgatgcaatgacctgcctcgagagacaagccacccactccagggcctcctctctgctgagagctgaactctcaatgggacaatctgcctacagggaagagatacccactgcaggtctcttctgagccg

SEQ ID NO: 9173 - DNA, 96 bp, homo sapiens
aatagtaaaacagataagcaatggtattatatataatgtcatacaatggattactatataattaattttcttcaatagtaaaacatataagcaatg

SEQ ID NO: 9174 - DNA, 112 bp, homo sapiens
tttaccatcccaattaaaatcagagtttgccagattgaataaaatagtatatcccaaataattaattaattaattaaaatggtttaccatcccaactaaaatcagagtttgc

SEQ ID NO: 9175 - DNA, 95 bp, homo sapiens
tgttggtgttacttcatctggaatgtttacgtctttatttgcaagtgtttatttaatgtttagtttttttgttggcgttacttcatctggaatgt

SEQ ID NO: 9176 - DNA, 123 bp, homo sapiens
tgccgtggtatactcatgactcactgtagcctcaatatacatacactaatatatatatacactaataatgcagccacagtatacatacatgccgtggtatactcatgactcactgcagcctca

SEQ ID NO: 9177 - DNA, 75 bp, homo sapiens
ttccactcagtcattaaaagttacttacttttaatattatacattgctagagttccacccagtcattaaaagtta

SEQ ID NO: 9178 - DNA, 83 bp, homo sapiens
gaatgaagtatggaggataaggtctgcatccacctcattcattcgtgttgtcttcattaggaatgaagtatgggggataaggt

SEQ ID NO: 9179 - DNA, 138 bp, homo sapiens
tcttctgtctacctaaaggattgtaaacacaccaatcagtgctctgtgtccagctaaaggtttgtaaatgcaccaatgggcactctgtaaaaacgcaccaatcagcactctgtgtctagctaaaggtttgtaaatgca

SEQ ID NO: 9180 - DNA, 106 bp, homo sapiens
agtaatttagaatagttttagaaacaaaatgtgagttttcaaagttgttgcaaagcccaaacaaattagaaatttgcagagtaatttagaatagttttaggaacaa

SEQ ID NO: 9181 - DNA, 108 bp, homo sapiens; identical to SEQ ID NO: 2484

SEQ ID NO: 9182 - DNA, 85 bp, homo sapiens
aggcagcgcatctagagttgttcattcctcttggtgggttcatggtctcgctgacttcaggaggcagcgcatccagagttgttca

SEQ ID NO: 9183 - DNA, 103 bp, homo sapiens
aatataatggcatgagatctaaaacttggatggaatataatggcatgagatctaaatgccatttagatggcattaatatataataaatggcatgagatctaaa

SEQ ID NO: 9184 - DNA, 72 bp, homo sapiens
aagaggtgatcagaggaaaattcatacaacagtgcttcactacagctttaagaggtgatcagaggcaaattc

SEQ ID NO: 9185 - DNA, 140 bp, homo sapiens
ttccatatttagtgcttccttcaggagctcttgtaaggcaggtctgatggtaatggattcccttacgttcttttctatactggctattttattctttcctttccatgtttagtgcttccttcaggagctcttgtaaggca

SEQ ID NO: 9186 - DNA, 105 bp, homo sapiens
ttgatattttaccagatgacagttttacttgtgttaaaaacagaatcataaacagtaactaaacacattgatattttaccagatgacagttttacttgtgttaaa

SEQ ID NO: 9187 - DNA, 112 bp, homo sapiens
aatattggaattaaatactacctcaataagcagacagttatacaatgcttataatatagaaaaactatgatccaaatactacaatattggaattaaatactacctcagtaag

SEQ ID NO: 9188 - DNA, 114 bp, homo sapiens
tgtccattttgcccctttttatgaggatactagttctactgatttatgaggacaccagtcattctcccctatttgcctgtgtccattttgcccctttttatgaggacactagtt

SEQ ID NO: 9189 - DNA, 99 bp, homo sapiens
attgtgtagatatatcaaaattaatttggcttggtaatatttagtattctttcatcaatgtacagaattctattgtgtggatatatcaaaattaatttg

SEQ ID NO: 9190 - DNA, 93 bp, homo sapiens
caaggtcaacactaaagagaaaaatcttaaagacaatcaggaagaaaaaacaaaaaaaaaaggcctacacaaggtcaacactaaagaaaaaaa

SEQ ID NO: 9191 - DNA, 130 bp, homo sapiens
ggctaaagcttttataaaggttaccttcacaagttatccaaaaattaaactatactttagtttgttctcacataaccatctagaaagagaatggctaaagcttttataaaggttaccttcacaagttatc

SEQ ID NO: 9192 - DNA, 75 bp, homo sapiens
ataaacagtgtttctgtggggtaggtgtccattcataaattttgtatttccataaacagtgtttccgtggggtag

SEQ ID NO: 9193 - DNA, 118 bp, homo sapiens
tatattctccagagaaacagaacccatagcatatatatacacatatatgtgtatatatatatgtgtgtgtgtatgtatattctccagagaaacagaacccatagcatatatacacaca

SEQ ID NO: 9194 - DNA, 110 bp, homo sapiens
atatattcttatcctaaagtaattatattctatttttatcctaaaatatattctatatcgaatacattctttatctctatctaaaatatattcttatcctaaaataatta

SEQ ID NO: 9195 - DNA, 71 bp, homo sapiens
gatgatatatagacgctgcaaaaggcaaaaatttcacaaaggcaaaatgatgatatatagaagctgcaaaa

SEQ ID NO: 9196 - DNA, 99 bp, homo sapiens
atggtattttggggtagcaaaataccttcaaataccttccagacagtgtcttctatgaggttccatgttttctagaatggtattttggggtagcaaaat

SEQ ID NO: 9197 - DNA, 137 bp, homo sapiens
agaataccatagattgagtggcttaaacaacaaacatttatttcccacaggtgtgggggctgggaagtccaagattatacaatagatagaataccatagattgagtggcttaaacaacaaacatttatttctcacag

SEQ ID NO: 9198 - DNA, 71 bp, homo sapiens
cagcaatatgtagaaaaattctacatctagcctttgacccatcatattcagcaatatgtagaaaaattcta

SEQ ID NO: 9199 - DNA, 81 bp, homo sapiens
tttaacttaatcattaagttaaaatgaataaatgctaaataccacgttcttactgactttaacttaatgattaagttaaaa

SEQ ID NO: 9200 - DNA, 83 bp, homo sapiens
aaacgttataatttataaatataattataatatattagattataatatattatataaaaactttataatttataaatataatt

SEQ ID NO: 9201 - DNA, 76 bp, homo sapiens
accggccattttcacttcttttgtggtggaatgtcatcagttaaggcaggaacaggccattttcacttcttttgtg

SEQ ID NO: 9202 - DNA, 136 bp, homo sapiens
ggactacaggcatgcaccaacaaacgtggctaatttttgcataattttgtagagatggggttttgccatgttgcccaggctggtcttgaactcctgggactacaggcatgcaccaacaaacctggctaatttttgc

SEQ ID NO: 9203 - DNA, 90 bp, homo sapiens
tttggcatcatcagcttctggtcatctctttatgtaagtgttttcatttttaaattagatttggcatcatcagcttctggccatctcttt

SEQ ID NO: 9204 - DNA, 98 bp, homo sapiens
cttatttattttttctgtgtgcaggataaacatgcatgcacacagaaaaatgacttcagatttgcatagttgtatcttatttattttttctgtgtgca

SEQ ID NO: 9205 - DNA, 93 bp, homo sapiens
aagttactgtatgtatttttatttttatttttttgagacggagtctctctcactctgttgcccaggctcaagttactgtatgtatttttatat

SEQ ID NO: 9206 - DNA, 79 bp, homo sapiens
aatcagctcccttaaacttattttttttatacttggtattctatatgtgtgtaatcagctcccttaaacctattttttt

SEQ ID NO: 9207 - DNA, 95 bp, homo sapiens
caagagccctctcaggctaagccccagtttggaggcttgtctgtcgacctacatcaatataagtcaagagccctctcaggctaagccccagtttg

SEQ ID NO: 9208 - DNA, 99 bp, homo sapiens
attttcactgattagatgttttcactgattagatattttcatgaatatattttctatgaactgtttgaacaaagacattttcactgattagatattttc

SEQ ID NO: 9209 - DNA, 98 bp, homo sapiens
cattttacaaacctcatgctagctacagagcactgattgatgcatttttacagagtgctgattggtgcattttacaaacctcttgctagctacagagc

SEQ ID NO: 9210 - DNA, 108 bp, homo sapiens
caccaatcggcactctgtatctagctcaaggtttgtaaacacaccaatcagcaccctgtgtctagctcagggtttgcgaatgcaccaatcgacactctgtatctagct

SEQ ID NO: 9211 - DNA, 81 bp, homo sapiens
atctagaaaacgataaaaatgtgtacagcatagctcatcagatagcatagcttatctagaaaatgataaaaatgtgtacag

SEQ ID NO: 9212 - DNA, 142 bp, homo sapiens
acttgaggtttatgattcttccaaatagaacttcaacaatgattcttccaatggaacttgaggtttatgattcttccaaatagaacttacatatctggtccctgtaaacatatctcacacttgaggtttatgattcttccaa

SEQ ID NO: 9213 - DNA, 143 bp, homo sapiens
taatagtagtatttgctccacaggtggctatgagaattaaataggtagctgtgagaattaatagtagtatttgctccataggtggctgtatttattaaattaaataaatactactaatagtagtatttgctcaataggtgggt

SEQ ID NO: 9214 - DNA, 90 bp, homo sapiens
atacatgtgaaaatattcagaaattatgagtgtcaacatctaagaaaggtcttgatatataaacatacatgtgaaaatatttagaaatta

SEQ ID NO: 9215 - DNA, 222 bp, homo sapiens
cattaatatttaaacatatacttctatatattaataaatataaataacaaattatcaataatcatattgaaatataaataaaataatatttattattcataatacatataaatataaaaatatatttatttatatttaatatataaatttatgtaatatttaaatatatactcctatatatttaaatgtaatatttaaatatatactcctatatatttaaat

SEQ ID NO: 9216 - DNA, 90 bp, homo sapiens
tatatttgttatatataacaaatatatgacaaatatatatgtaacacatatataatttatatatgtatttgttgtatataacaaatatat

SEQ ID NO: 9217 - DNA, 73 bp, homo sapiens
caatatctgagaaaagcaatgaatctgaaatcaaatcagtctgaaagcacaatatctgagaaaagcaatgagt

SEQ ID NO: 9218 - DNA, 155 bp, homo sapiens
tgattggtgcgcttacaaatctttaactagacacagagtgctgattggtgcgtttacaatcctttagctagacacaaaagttccccaagtccccacccgattagccagacacagagcaatgattggtgcgtttacaaacctttagctagacacaa

SEQ ID NO: 9219 - DNA, 106 bp, homo sapiens
gctgtaagatgtgtgcacaacagaagaaccaatatataccataaaagatccacagtttttaatgaggaaaagctgtaagatgtgtgcacaacagaagaaccaatat

SEQ ID NO: 9220 - DNA, 94 bp, homo sapiens
agacagccatctataggaagcagacacaagaacacacaaagaacatacacaagaacacacacgatctatagacagcaatctataggaagcagac

SEQ ID NO: 9221 - DNA, 115 bp, homo sapiens
gaaagtgtttttaaataatatataaatatttgagaattaaatgagcagtgtttggactagaactttgcacttagtaagcaccacgaaagtgtttttaaataatatataaatattt

SEQ ID NO: 9222 - DNA, 99 bp, homo sapiens
ggctccctgtgaagtacctgcttgggaaagggaggagttgtggcagtttcttctaggtccccgaaggctccctgtgaagtacctgcttggggaagggag

SEQ ID NO: 9223 - DNA, 81 bp, homo sapiens
acttgatcatggtgtttatctttatacatgatgatatatctttatatcttaatacactacttgatcatggtgtattatctt

SEQ ID NO: 9224 - DNA, 105 bp, homo sapiens
gtaaagatatacaacatggatatataatatatacaatacacatatattatacatgagcatattgcacatatacatgagtgtataatatatacaatacacatgtat

SEQ ID NO: 9225 - DNA, 79 bp, homo sapiens
tccccatgctcctgacagtacaccaggaccactctgtgttcactcccgtgtgcagtccccatgctcctgacagtacacc

SEQ ID NO: 9226 - DNA, 101 bp, homo sapiens
cacctaatctgttatgactggtatccttataaggataaaatagtcattaaggtgaaatgaggtcatcacctaatctgttatgactggtatccttataagga

SEQ ID NO: 9227 - DNA, 76 bp, homo sapiens
tccttgagcacatgtctaaatggacgtgggtcccttggcactgggcatgctttccttgagcacatgcctaaatgga

SEQ ID NO: 9228 - DNA, 95 bp, homo sapiens
aaagtgaagttacaaaggttacacactatgcaaacgtctgattagttgtggaaagcaaccaatcagcggctaaagtgaagttacaaagttacact

SEQ ID NO: 9229 - DNA, 84 bp, homo sapiens
tcttaagagagtgtgacagatactaatcttctatttaaaatgtttcagctggtttttctatcttaggagagtgtgacagatact

SEQ ID NO: 9230 - DNA, 112 bp, homo sapiens
aaaaaaaattggtttttaaaaaattacataacatatgtaatttttaaaacatatgttttaaacatatgtaattttcaaaaaaaaattggtttttaaaaaattacataacata

SEQ ID NO: 9231 - DNA, 124 bp, homo sapiens
acctgcaaagttggcaggcagtggctagaaggcgactgggatggatgaatggcttccttgagcagccaccctgggaccatgcagatgaaactacctgcaaaggtggcaggcagtggctagaagg

SEQ ID NO: 9232 - DNA, 143 bp, homo sapiens
agaggtcaggcttgagaagcagagggttagtgaaaaggatttctttagagaaagaactagttagataattcacccacatcaagggcataaagaggtcaggcttgagaagcagagggttagtgaaaaggatttctttagagaaa

SEQ ID NO: 9233 - DNA, 71 bp, homo sapiens
ccaattgtgttttatacttctgtgacctaccatcctcaatgctgaggaccaactgtgttttatacttctgt

SEQ ID NO: 9234 - DNA, 81 bp, homo sapiens
aacacccagatgttattactccagaactttggatctctactatatgccaattttggtgaacacccagatgttattactcta

SEQ ID NO: 9235 - DNA, 72 bp, homo sapiens
tctcccctgctgcaccccaagtgaacctttcccatcctgggcaggcacagctcccctgctgcaccccaagtg

SEQ ID NO: 9236 - DNA, 124 bp, homo sapiens
tgcctatttttataccagtaccatgctgttttggtgacaagtatttggctttatttcttggttctctattatgtttcattggtctatgtgcctatttttataccagtaccatgctgttttggtg

SEQ ID NO: 9237 - DNA, 263 bp, homo sapiens
agaccccaaaaaatatgtccatgcacctgagtctatatttatggataaaagatgatatccatggccctgagactctgactacaggcatgagaatatgtccatgtacctgagactctatttacggatgagagatgatatccatggccctgaggctccgaccacagacatgagaatatgtccatgcaccggagactatagttatggataagagactatgtccatggccctgagattatgaccacagacatgagaatgtgtccatg

SEQ ID NO: 9238 - DNA, 234 bp, homo sapiens
ccctaactctaatgctaacccctaaaccatcccccaccctaacccaatcctcgccctaaccctaatgctaacccctgacccgacccaatcctaaccctgatgctaacccctgactcaactctcaccctaaccctgatgctaacccctgacccaatcctcaccctaaccctgatactaacccttaacctaacccaacccagccctaactccaactctaaagctaactcctaaccc

SEQ ID NO: 9239 - DNA, 117 bp, homo sapiens
tcttgctctgtcgcccaggctggagtgcagtgatgcaatcacagttcactgcagtcttttttttttttttttttttgagatggactcttgctctgttgcccaggctggagtgcagtg

SEQ ID NO: 9240 - DNA, 74 bp, homo sapiens
tcttgtgtgtccaggatattgcacagaagttcacaaatgaatagccacgtattttgtgtgtccaggatattgca

SEQ ID NO: 9241 - DNA, 87 bp, homo sapiens
ttgtgttcggcaggagatttcaatgccatccattgaaagcattgagattcagtgttatccattgtgtttggcaggagatttcaatgc

SEQ ID NO: 9242 - DNA, 81 bp, homo sapiens
ataaataataatcaatctatttatctataataaatcaataataaatcaataatatttatcataataaatcaatctatttat

SEQ ID NO: 9243 - DNA, 133 bp, homo sapiens
ccagaaatgtccttgtatttctataggagggtccccatttgggtgcttcactcccatgctgtactaaccacctcatagagaaaggggctatgccagaaacgtccttgtatttctataggagggtccccatttg

SEQ ID NO: 9244 - DNA, 108 bp, homo sapiens
aggcaggcaataccaaataatggtgagaatataatggaaaaaaagaaaagaaaaaagaagattgagtaagggagggaggcaggcaataccaaatgatggtgagaatat

SEQ ID NO: 9245 - DNA, 122 bp, homo sapiens
tggggacccaaggaaggaaggaagggcagcaagaaaccattgactatgaatggaaggtgagaatcctgaaggaaggaaggaaggaaggaaggaaggaaggaaggaaggaaggaaggaaggaa

SEQ ID NO: 9246 - DNA, 134 bp, homo sapiens
ggtgtgaagagggggagagaagggagcacccttgggtaacagcccttgagagaaacccagttcctagagggcccagagcacctgggggtgtgaagagggggagagaagggagcacccttgggtaacagcccttg

SEQ ID NO: 9247 - DNA, 96 bp, homo sapiens
agcagtaggagtccgcagaggcatggctaagagtggttaaacctaagcggcaggggacagcagcagtaggagtccgcagaggcatggctaagagtg

SEQ ID NO: 9248 - DNA, 91 bp, homo sapiens
cctgggagtgggcaacatcagggagtgggcaactagcctgggagtggctactccccaattaacctgggagtgggcaacatcagggagtggg

SEQ ID NO: 9249 - DNA, 114 bp, homo sapiens
cactcacagggctactgggagggtaaaactggactcgaggttgatggaatgagctaagggactgttcctccgcgactgttcctccgcactcacagggctactggaagggtaaaa

SEQ ID NO: 9250 - DNA, 99 bp, homo sapiens
atctcagtaccatactccattccattcacatcatgaggatggatcatatgatgaggatcccatcagatcctcctgatctcaataccatactccattcca

SEQ ID NO: 9251 - DNA, 79 bp, homo sapiens
gacattctgttcagagaaaccacctgtcccgctaaggcaggcagacattgctactgacattccgttcagagaaaccacc

SEQ ID NO: 9252 - DNA, 152 bp, homo sapiens
cccacagccttcacccgctctcatccctcctgggactctcccttctcagggacacctgggcacccacagccctcgcccactctcctccctcccccacagggtttggccgctctcctccctcccccacagcccccgcccactctcctccctcc

SEQ ID NO: 9253 - DNA, 83 bp, homo sapiens
tgcttttctgacactatgtatcaagatcctgaaacatgtgctagtccacttcctaaggttgcttttctgacaatatgtatcaa

SEQ ID NO: 9254 - DNA, 102 bp, homo sapiens
gtggggcgcacaccccttgagggaggtgtaggatggtttcacactgtgggcagcattgatagcagtggtctgcacagtggggcgcacaccccttgagagagg

SEQ ID NO: 9255 - DNA, 96 bp, homo sapiens
agttattttcaagctcttctgaactggagaagtacaactgattagattcaacttctctgcttctctttcaagttattttcaagctcttctgaactg

SEQ ID NO: 9256 - DNA, 107 bp, homo sapiens
gttgctcaccagctctctatacccacgggcgctctgaccccgcctgcaggacaggatcctgcctcagttgctcaccagctctctatacccacgggcgctctgacccc

SEQ ID NO: 9257 - DNA, 73 bp, homo sapiens
ggagagggtctcccagttggccaccactgggacgggcattcgggcctgtgggagagggtctcccaggtggcca

SEQ ID NO: 9258 - DNA, 92 bp, homo sapiens
ttgtttttgtttttttgagaaggggtctcactctgtcccggctggagctcagtgatattttgttgtttttctttttttgagaaggggtctca

SEQ ID NO: 9259 - DNA, 81 bp, homo sapiens
ggccttggccccggcacactaagcggctgcaccactgtctcgctttcgcctgttggccttggccctggcacactaagcggc

SEQ ID NO: 9260 - DNA, 208 bp, homo sapiens
tgctgtgagatgatgttgggtgtctgatgggtgtgtggtgtgtgcgagatgatgtgtgggtgtctggtgagtgtgtagtgtgtgtgagatgatgttgggtgtctgatgggtgtgtggtgtgtgtgagatgatgtgtgggtgtctggtgagtgtgtggtgtgtgagatgatgtgtgggtgtctgatgggtgtgtggtgtgtgtgagatg

SEQ ID NO: 9261 - DNA, 103 bp, homo sapiens
ggccctaaagcccgctgtgcttctcatatccatttctttcccccttgaccatcacagtgtcacacaaagtcgttttctggccctaaagcccactgtgcttctc

SEQ ID NO: 9262 - DNA, 91 bp, homo sapiens
ggggagtggggtgtgaccggccgtggctgatgctccccgtgccactgccaggtgatggatcggggagtggggtgtgaccagccgtggctga

SEQ ID NO: 9263 - DNA, 96 bp, homo sapiens
gggtcccgcacgttcccgctcatggaaatccagcgcccagcgccacatctctgactgcagggccaggacggtgggtcccgcacgttcccgctcatg

SEQ ID NO: 9264 - DNA, 101 bp, homo sapiens
caggggctgtggctcaggagccatgtgccaggcagggcactccgtcagtgtagggtctcccagcacaggggctgtggctcaggagccacgtgccaggcagg

SEQ ID NO: 9265 - DNA, 74 bp, homo sapiens
acctaaatctgttgtttaatgaagacgcgctggcaccaagcttctgggcgacctaaacctgttgtttaatgaag

SEQ ID NO: 9266 - DNA, 156 bp, homo sapiens
agaaccaagtagaactgctctcagtgagaactgtagatattttaaagcaaaaacttacagacaggttttgtatcagattagatacagttaatgagaatgggtacagaaccaagtagaactgctctcagtgaaaactgtagatattttaaagcaaaa

SEQ ID NO: 9267 - DNA, 124 bp, homo sapiens
gtccctcctttgcctgccaaggctgaggtcctgtacttttgtgtgtggatctggccttggcctccgcaccgtctgttcagcaggtccctcctttgtctgccaaggctgaggtcctgtacttttg

SEQ ID NO: 9268 - DNA, 110 bp, homo sapiens
ggtgaagtacacaggacagggtcctcggtctggcctgtgccatggggaccttgggcctcagtttccccacctttgatggaatacggtgaagtgcacaggacagggtcctc

SEQ ID NO: 9269 - DNA, 82 bp, homo sapiens
ctgtctgtctcggggggcttggctgtctgcggggggctcggctgtctggggggctcggctgtctttctgggggagcttgtct

SEQ ID NO: 9270 - DNA, 110 bp, homo sapiens
ggggttttaagtgctgtgtgtgggctcgggagggcacccgtgtgccagctgggctgatgcaggggccgagagggttggggttttaagtgctgtgtgtgggctcgggaggg

SEQ ID NO: 9271 - DNA, 101 bp, homo sapiens
gctgcgggtgtgtggggacactgtgtctagttgcagggtggaccgggcggaggactgtaccgtccagcagggcgcggctgcgggtgtgtggggacaccgtg

SEQ ID NO: 9272 - DNA, 95 bp, homo sapiens
tatgggctcagacgctgggagctgcttcaccctatgaggacagggcgggctgaagtccaggagacttttatgggctcagacgctgggagctgctt

SEQ ID NO: 9273 - DNA, 138 bp, homo sapiens
gtatgtgcctggcctccctggaggcgggagtggggaggcagggacgggtatgggcgtggcctccggggagggggttggcagggatgggggtctggattctggcaggctgaactctgtatgggcgtggcctccggggag

SEQ ID NO: 9274 - DNA, 108 bp, homo sapiens
ttaagtcacctgccccagaggggaggcttgagtgacacctggagctcctgcaccatgggggagacatgagtgacacctgagcacctgtatcttgtaggaggtctgggt

SEQ ID NO: 9275 - DNA, 106 bp, homo sapiens
cctgagcacctgcaccacgggagaggcttgggtagtgtgtggacacctagaccacagggaggcctgggaactgcctgagcacctgcaccacgggagaggcttgggt

SEQ ID NO: 9276 - DNA, 498 bp, homo sapiens
tctgcagcaggaggcggtgcagcaagccggctggcagctagactgctggcagcatgatgtggaagccccagagcagacgggcacacagcaggcgtgctggcagggggaggaggtgcagcaagctggctggcagctagactgctggcagcatgaagaggaatcctcagagcaggtgggcacacagcacacaggcacgcagcagacgggcacgcagcaggcctgctggcagggggaggaggtgcagcaagttggctggcagctagactgctggcagcatgagggtgtgcaggagctggtgcagcctgattggcaggggctgggctcacagaccgcctggcagcaggggctggacacacagctcacacagctagactgctggcagcacgaagaggaaatcccagagcagacaggcttgcagcagacgggcacacagcaggcctgctggcagggggaggaggtgcagcaagctgactggcagctagactgctggcagcatga

SEQ ID NO: 9277 - DNA, 117 bp, homo sapiens
catcctgctatgtgcccgtgagctgccagtcctccgtgtgcatgcccgtgagctgcacgcgcattgtgtgcgtggctccctcctgccagccctccgtgtgcgtgcccgtgagctgca

SEQ ID NO: 9278 - DNA, 94 bp, homo sapiens
tgattggttgtggaaagcaaccaatcagaggctgaagtgaagttacaaagatcacgccctatgcaagtgtatgattggttgcggaaagcaacca

SEQ ID NO: 9279 - DNA, 93 bp, homo sapiens
tggacctccacctcctgtgtgcgctttgtgggcagttgtcgggaggggaccccccatgctgtggacctccgcctcctgtgtgcgctttgtggg

SEQ ID NO: 9280 - DNA, 134 bp, homo sapiens
tctgtgctgctgtgtggatcaatgtggcatattcctattaggattccatggtatggagagactgcaatgattattctgagatcaatctgtgctgctgtgtggatcaatgtggcatattcctattaggattccat

SEQ ID NO: 9281 - DNA, 92 bp, homo sapiens
aagaacaagctaccacagaggcatgaggatcacactggcatttggcttcttgttgctgatgttagaagaacaagctactacagaggcatgag

SEQ ID NO: 9282 - DNA, 93 bp, homo sapiens
gctgtgatgggaaagctctctgctgagttggttcagtctgggtcacagagtgagtgaatgctgggctgctgtgatgggaaagctgtctgctga

SEQ ID NO: 9283 - DNA, 87 bp, homo sapiens
gcggtcaccagggcgtgagtgtggacagatgggagtggctggtgcagagccataggtagggggcggtcaccagggcgtgagcgtgga

SEQ ID NO: 9284 - DNA, 106 bp, homo sapiens
tcacagcaccagacacttcagacccaggttggagagctcaaaggcctgaaacaggctccaagaagatgtgagtctgaattcacagcaccagacacttcagacccag

SEQ ID NO: 9285 - DNA, 95 bp, homo sapiens
ctggctgagggagacacaaacctgaacgggctctgacaaggcagatgctcctccccagggggtttcagactctggctgagggagacacaaacctg

SEQ ID NO: 9286 - DNA, 120 bp, homo sapiens
ccacatcacctggctacctactactgtaccacgcatacccggccaagatgagattcgggtggggacacagccaagccacatcacctggctacctactactgtaccacgcatacccggcca

SEQ ID NO: 9287 - DNA, 102 bp, homo sapiens
gagagaggggcccccacaacaccctccccagcccccgctgattgtgtgggggcagggagtatgcaggcagctcggagagaggggcccccacaacaccctccc

SEQ ID NO: 9288 - DNA, 94 bp, homo sapiens
cactaaggggccgtcgtgtttctctgggaacgtggcgttcaccgtgtgggtgaactttttcacgcactaaggggccgtcgtgcttctctgggaa

SEQ ID NO: 9289 - DNA, 117 bp, homo sapiens
cggtccgtcctctgtgacctggtcacccagcatctcttagatttcctctgaggacagtgtgctctcctggaccgcggtccgtcctctgtgacctggtcacccggcatctcttagatt

SEQ ID NO: 9290 - DNA, 105 bp, homo sapiens
gctctgccacacatgacgggcagcaggtcatgactggcagcaggtgcctgccccaccagctgtgccacacatgatgggcagcaggtcatgactggcagcaggtgc

SEQ ID NO: 9291 - DNA, 90 bp, homo sapiens
caggtggggcacaagccgccacctaaccgtgccttcgccacaggggccctcagagaggctgccaggtggggcacaagctgccacctaacc

SEQ ID NO: 9292 - DNA, 150 bp, homo sapiens
cccacaggagctaatccaccatgcagcagggaggggtcttggagacgctatgtgggaatgggatgtggcactggcacccccgctagggtgcccacggtggcgcccacaggagctaatccaccacgcagcagggaggggtcttggagacgc

SEQ ID NO: 9293 - DNA, 121 bp, homo sapiens
tctaggtgtgaatggatcagaggggaaggagctgaatttacggtagattccaacagtccatggaagatcctcctccagtgtctaggtgtgaatggatcagaggggaaggagctgaatttac

SEQ ID NO: 9294 - DNA, 76 bp, homo sapiens
gatggccctggaactgatgacagcctaccctgcgtgtctcacctgggaatggatggccctggaaccgatgacagcc

SEQ ID NO: 9295 - DNA, 106 bp, homo sapiens
tgagcatggggttcccgcctcctcctccaagtgactttccttctgctcccagccctgcatcctcccaggagatggggtgcctgagcatggggttcccgcctcctcc

SEQ ID NO: 9296 - DNA, 91 bp, homo sapiens
gtcaccctgatgctctgagtggtgtttcagatcatcacacgaagtctccagataggagggcaaagcctgtcaccctgatactctgagtggt

SEQ ID NO: 9297 - DNA, 106 bp, homo sapiens
tcccaggaccctctgcgtgtccctggtcctcgcggcctgcatctgagcgaggccccctccatcctccctccagcctctcccaggaccctctgcatgtccctggtcc

SEQ ID NO: 9298 - DNA, 188 bp, homo sapiens
ggacagagaggctgcatgaccaccagtgtctagccctggtggactctggcttattccacacagggcaggtgggacagacaggctgcatgaccactggtgtctagccctggtggacaccggcttattctgcacagggcaggttggacagacaggctgcatgaccacaggtgtctagccctggtggacac

SEQ ID NO: 9299 - DNA, 88 bp, homo sapiens
ctcctctctgcagctggtcgtcctgacatcccttcaggtcctgaagctctcagcagagagagcacctcctctctgcagctggtcgtgc

SEQ ID NO: 9300 - DNA, 108 bp, homo sapiens
accctcaaaggtaaggccagaaatcagcacccagccacagagccagcccactgccggtgtggccacaggccaccctcaaaggtaaggccagaaatcagcacccagcca

SEQ ID NO: 9301 - DNA, 104 bp, homo sapiens
tatggcatacaagcataggcacacactcacccattcacacacacccctacctcggtatgctttttagaacctatggcatacaagcataggcacacacacaccca

SEQ ID NO: 9302 - DNA, 90 bp, homo sapiens
gggggtgtaactgatgttatcaaaaatcaggccatagacgcgtgtgatgccaatacaaccccagggggtgtaactgatgttatcaaaaat

SEQ ID NO: 9303 - DNA, 95 bp, homo sapiens
aggggcagctagatattaaccaaagccgggtagatctcttttgctggcaggttagatattcaggggcagctagatattaaccaaagctgggtaga

SEQ ID NO: 9304 - DNA, 86 bp, homo sapiens
gtcaaaacaagttacttctgttttctactggttctattagtcctattagttcagctcatgtcaaaacaagttacttctgtcttcta

SEQ ID NO: 9305 - DNA, 120 bp, homo sapiens
ccatctactggcaagaacgtttcttacccgatgacccatgtgacatttggtttttagagggatagggacagatagaagacaagttatccatctactggcaagaacgtttcttacctgatg

SEQ ID NO: 9306 - DNA, 400 bp, homo sapiens
caccaccagagatgcgcacgccgcacgcgcacgccgcacgcgcacgccgcacgcgcacgccgcacgcgcacgccgcacgcgcacgccgcacgcgcacgccgcacgcgcacgccgcacgcgcggcagtggcttggctggcttgtaacggcttgcacgtgcatgccgcgcgcgcacgccacacgcgtggcagtggcttggctggcttgtaagggcttgcacgtgcatgccgtgcgcgcacgccggacgcgtataacggtttggctggcctgtaactgcttgcacgcgcatgccgcacgtgcgtaatggcttggctggcctgtaatggcttgcacgcgcatgctgcacgcgcgttaacggcttggctggtctgtaacagtcggcatgcgcacactgcacgtgc

SEQ ID NO: 9307 - DNA, 121 bp, homo sapiens; identical to SEQ ID NO: 7317

SEQ ID NO: 9308 - DNA, 88 bp, homo sapiens
atttgacaaaatccagcatccctttatgcctaaaaccctcagcaaaattgacatagaaaaaacatttgacaaaatccagaatcccttt

SEQ ID NO: 9309 - DNA, 88 bp, homo sapiens
ttccagtggttcccagtgtcggagaaggggcctgctggaaggtggctggtccatgggagcagcttccagtggttcccactgtcggaga

SEQ ID NO: 9310 - DNA, 108 bp, homo sapiens
catcacctgggtgatcagtgcagagatatgtcacaaagcctccataggcaaagcctagacaagagttacatcacctgggtgatcagtgcagaggtatgtcacaaagcc

SEQ ID NO: 9311 - DNA, 154 bp, homo sapiens
gggccttctgcctctctgcgcctgcgccggcgctgtgggcctctctgcgcctgcgccggcgctgtgggcctctctgcgcctgcgccggcactgtgggcctctctgcgcctttcgccagcgctgtgggcctctctgggcctgcgccggcgctgtg

SEQ ID NO: 9312 - DNA, 94 bp, homo sapiens
ataaggtaagtgtttaaaaatctgggaataatcctgtaatttaaaagacggggttgtgatgaggcttcaataaggtaagtgtgtaaaaatctgg

SEQ ID NO: 9313 - DNA, 130 bp, homo sapiens
gctgtccacaggcacgaccccctgctgcggggctgtccacaggcacaatcccctgctgcggggccgtccagaggcacaacttccctgctgaggggctgtccacaggcatgaccccctgctgcggggctgt

SEQ ID NO: 9314 - DNA, 94 bp, homo sapiens
ccagatttttacacacttaccttattgaagcctcatcacaaccccgtcttttaaattacaggattattcccagatttttaaacacttaccttat

SEQ ID NO: 9315 - DNA, 108 bp, homo sapiens; identical to SEQ ID NO: 7313

SEQ ID NO: 9316 - DNA, 121 bp, homo sapiens; identical to SEQ ID NO: 7317

SEQ ID NO: 9317 - DNA, 63 bp, homo sapiens
ttttttattatttactactttattaaggtactaagaatttttcttgttattatcgactttttt

SEQ ID NO: 9318 - DNA, 119 bp, homo sapiens
tgcaccatgcaggtgtggctcagcacccaatgtccacgtgggtttccggatgccggagccaggcagaaggcagcacaggccatgcaccatgcagatgtggctcagcacccaatgtccac

SEQ ID NO: 9319 - DNA, 107 bp, homo sapiens
ttctgatgtagggagtgggggaccgcgcagcatcaagaagccaccgctggagtccagatgagggatgcgttctgatgtagggagtgggggacggcgcagcatcaaga

SEQ ID NO: 9320 - DNA, 84 bp, homo sapiens
ccaccacactctagcctgggtgacagaggtggaggctgtagtgagctgtcatcacaccaccgcactctagcctgggtgacagag

SEQ ID NO: 9321 - DNA, 87 bp, homo sapiens
gagcaaagcaagcacaggaaggctggctggaagtcccggcgcggctggagcggagcagagcagagcaagcacaggaaggctggctgg

SEQ ID NO: 9322 - DNA, 77 bp, homo sapiens
cagttatgcctaggccacgggatgaacccactaaagaaagcatgagatgctcagttatgcctaggccacgggatgaa

SEQ ID NO: 9323 - DNA, 102 bp, homo sapiens
gtccttgagtgagcggctgaccagctgctggcccatgcttagaggatgttcgtggtctgccccagggcccactggtccttgagtgagcggctgaccagctgc

SEQ ID NO: 9324 - DNA, 170 bp, homo sapiens
ctctgtgtctagctaatcaggtggggacctggagaacttttctgtctagctaaaggattgtaaatgcaccaatcagtgctctgtgtctagctaaaggtttgtaaacacaccaatcagcactctgtaaaaacacaccaatcagcactctgtgttagctaaaggtttgtaaa

SEQ ID NO: 9325 - DNA, 99 bp, homo sapiens
gaatcctcactgctgcacacgctacacacgcaggaagaaaaaagcccgtgtcatttatgaatgtcacagggcatagaatcctcactgctgcacacgcag

SEQ ID NO: 9326 - DNA, 143 bp, homo sapiens
agctgcagaagaaacacacacacacacacacacacacacacacacacacacacagctgcagaagaaacatacacacacacacatactgagctgaaggaatacacacatacactgagctgcagaagaaacatacatacacacac

SEQ ID NO: 9327 - DNA, 111 bp, homo sapiens
cagggcagataaatcgtattttctttccttctttctttctttctttctttctttctctctctctttctttttttttcttggtgacagggcagataaatcatattttctttc

SEQ ID NO: 9328 - DNA, 97 bp, homo sapiens
tccccatcccccatggctcttggccgttggggcccagttggccgcagagcctttggccttgagcacttccccagcccccatggctcttggccattgg

SEQ ID NO: 9329 - DNA, 99 bp, homo sapiens; identical to SEQ ID NO: 9325

SEQ ID NO: 9330 - DNA, 102 bp, homo sapiens
aggaggctgaggcgggcggatcagaaggtctcagccaggcaatgtggcccacacctgtaatcccagcacttcaggaggctgaggcgggcggatcagaaggtc

SEQ ID NO: 9331 - DNA, 110 bp, homo sapiens
ctgccatttgcagtttcctgtgtctcctccccactgtgcataagcctgtgtgcatttccacaggtgcccctgccatttgcagtttcctgtgtctcctccccactgtgcat

SEQ ID NO: 9332 - DNA, 118 bp, homo sapiens
gtgtgtgtgtgtgtatttcttcagttcagtgtgtgtatgtatgtttcttctgcagctcagtgtatgtgtgtattccttcagctcagtatgtgtgtgtgtgtatgtttcttctgcagct

SEQ ID NO: 9333 - DNA, 99 bp, homo sapiens; identical to SEQ ID NO: 9325

SEQ ID NO: 9334 - DNA, 77 bp, homo sapiens
gaggcaggagaatcgcttgaacctgggaagtggatcccatctactcgggaggctgaggcaggagaatcgcttgaccc

SEQ ID NO: 9335 - DNA, 77 bp, homo sapiens
ggacgtcagctggagtggtactatggactgaccagttgactgatcagttgagtggactcagctggagtggtactatg

SEQ ID NO: 9336 - DNA, 116 bp, homo sapiens
agcccagatggtgccattgcactccagcctagatgatagagtgagactccatcacaaaaaggaaaaaaaaaaggttgtcattctgcagcccagatcgtgccattgcactccagcct

SEQ ID NO: 9337 - DNA, 117 bp, homo sapiens
agggaatgggcttaaaccccaagatatcctacaccattttgtacacagcaggttctgtagggagaaaaccaacaaggtcttcccggagggaatgggcttaaaccacaagatatccta

SEQ ID NO: 9338 - DNA, 128 bp, homo sapiens
tgttggccagactggtctcgaactcctgacctcatgatccgcctgcctcggcctcccaaagtgctgggattacaggtgtgaaccaccacgcctgtgttggccaggctggtctcgaactcctgacctca

SEQ ID NO: 9339 - DNA, 97 bp, homo sapiens
tataatggaatattatgcagctgtaaaaaatgaacaaactacaggcacacacatcagaggagaatgggtataatggaacattatgcagctgtaaaaa

SEQ ID NO: 9340 - DNA, 86 bp, homo sapiens
taaaatatatactgtaatatattactgcatgtatatatatgtaaatacaaatgcagtatattatagcatatatatttaaaaatata

SEQ ID NO: 9341 - DNA, 107 bp, homo sapiens
tacccctcaaccccttctccttcaccctcagcggcaagtcccgctttcctagggggcaggggcaagtacccctcaaccccttctccttcacccttagcggcaagtcc

SEQ ID NO: 9342 - DNA, 110 bp, homo sapiens
ctttagtaaaatgcagcagattcctcatttggaagcttagcctccgaaaagaacaattattaactgaatgaacaatagtaaggccctttagtaaaatgtagcagattcct

SEQ ID NO: 9343 - DNA, 85 bp, homo sapiens
cctgtaatcccagcactttgggatcaagaggccaggagtttggccaggcatggtagctcaggcctctaatcccagcactttggga

SEQ ID NO: 9344 - DNA, 124 bp, homo sapiens
agggtaaggggcaggggagcttggggagaggttggttattggatacagaattatacctagatgggagaaatgggctttagtggaggctgggaagggtaagggggaggggagcttggggagaggt

SEQ ID NO: 9345 - DNA, 92 bp, homo sapiens
taatcccagcactttgggaagccgaagagggtggatcacttgaggtcaggggttcaagaccagcctataatcccagcactttgggaggccga

SEQ ID NO: 9346 - DNA, 106 bp, homo sapiens
cgaggccctgtcttaaaacacacacacacacacacacacacacacacacacacacacacacacccccccccccccccccgaggccctgtcttaaaacacacacaca

SEQ ID NO: 9347 - DNA, 101 bp, homo sapiens
ttttagtagagatggggtttctccatgttggtcaagcatgtgccaccacgcccagctaattttgtattttcagtagagatggggtttctccatgttggtca

SEQ ID NO: 9348 - DNA, 107 bp, homo sapiens
gaggcctcagcctgacattcaaggctggactcagaccgcccaacccatttcctggactaacttttatgcaacacaagaggcctcagcctgacattcaaggctagact

SEQ ID NO: 9349 - DNA, 96 bp, homo sapiens
ctctgtggcttgctagaggtttgtaaaatatgccaatcagtgctctgtaaaaacgcaccaatcagcgctctgtggctagctagaggtttgtaaaat

SEQ ID NO: 9350 - DNA, 72 bp, homo sapiens
tcctaaaagctattgcaaacagtgctgaatgtttccatcccaaaaactgtcctaaaagctattgcaaacagt

SEQ ID NO: 9351 - DNA, 77 bp, homo sapiens; identical to SEQ ID NO: 9334

SEQ ID NO: 9352 - DNA, 114 bp, homo sapiens
ccagcactttgggaggccaaggtgggcagattgcttgaggtcaagagtttgggattaggccaggcgcagtggctcacgcctgtaatcccagcactttgggaggccgaggtgggc

SEQ ID NO: 9353 - DNA, 123 bp, homo sapiens
cctcacccagatttaaaaggtgttagcattttctatacttgcaaaaaaaaaaaaattagcagatagccaagtactcaacaccctcacccagatttaaaaggtgttagcattttctatacttgc

SEQ ID NO: 9354 - DNA, 73 bp, homo sapiens
gccaatatggtaaaaccccgtctccactaaaaatacaaaaaactagccagccaatatggtgaaaccccgtctc

SEQ ID NO: 9355 - DNA, 81 bp, homo sapiens
ccaaactttcccacatcttcctgtcttttgagccctccaagtcactgggaagttccaaactttcccacattttcctgtctt

SEQ ID NO: 9356 - DNA, 95 bp, homo sapiens
ttatttggttatcactagccccaaaaatgccccccaaaaagcataataaatagtttattctatttggtttatttggttatcactagcccccaaaa

SEQ ID NO: 9357 - DNA, 90 bp, homo sapiens
cccagcaattcacaagctgtgtgaccttggaccaggtccccaacacatacaccagagccccagcaattcacaagccgtgtgaccttggac

SEQ ID NO: 9358 - DNA, 110 bp, homo sapiens
tcctctgctcatccacccattccactgcgtgtgtgtgtgtgtgtgtgtgtgtggtgtgttctactccgtgtgtgtgtcatcctcctctgctcatccacccattccactgc

SEQ ID NO: 9359 - DNA, 85 bp, homo sapiens
tctgcattttctcctgccaggcacatgtggtcctcaaaagtgctgattagcaaatatatctgctttttctcctgccaggcacatg

SEQ ID NO: 9360 - DNA, 100 bp, homo sapiens
gaggacctagtcatcacgcgacactcttcacctgacagcaatagaggacacacacataggacagaaggaggacctagtcatcacgtgacactcttcacct

SEQ ID NO: 9361 - DNA, 96 bp, homo sapiens
agactccatctcaaaagaaaaaaaaaaatgctgaaacttaattgcacttcagcctgggcgacagagcaagactccatctcaaaaggaaaaaaaaaa

SEQ ID NO: 9362 - DNA, 87 bp, homo sapiens
tgtttttctgaacatgtaatatatagtatatacacacatatatagtatacccacataccattatgtttttctgaacatgtaatatat

SEQ ID NO: 9363 - DNA, 91 bp, homo sapiens
gatatgagctcacacaaacgagttatattaaagggctgcagtgtgattacatagtgctcaaagccggatatgagctcacacaaatgagtta

SEQ ID NO: 9364 - DNA, 69 bp, homo sapiens
atgtacatcacacaatgcaacctatacacttccatgtacattgcacatgtacatcacacattacaacct

SEQ ID NO: 9365 - DNA, 97 bp, homo sapiens
agatcgtgccactgcactccagcctggcaacagaataagactccaggaggcggaggttgcagtgagcccagattgtgccactgcactccagcctggc

SEQ ID NO: 9366 - DNA, 91 bp, homo sapiens
tcagctgtcagcagagaggagaccctggagtggatagctcctctctaaagctggttgtcccatcatctcagctctcagcagagaggagacc

SEQ ID NO: 9367 - DNA, 86 bp, homo sapiens
gtaccccgggtgggctgtcagaccctgatctccagatttaagctccattctccatgccagtaccccgggtgggctgtcagaccctg

SEQ ID NO: 9368 - DNA, 74 bp, homo sapiens
ttccttcatttgatcctctgaggtcgatccacctcaggtccacatgtactttccttcatttgatcctctgaggt

SEQ ID NO: 9369 - DNA, 95 bp, homo sapiens
caaacatggctggagaaaccccaggattcttagaaacaaacatggctaatgaaattccatcattctaagggacaaacatggctggagaaatccca

SEQ ID NO: 9370 - DNA, 82 bp, homo sapiens
gtggactttcatccctggccacagcaaggcttcctggagccacagattcagatggcctgtggactttcatccttggccacag

SEQ ID NO: 9371 - DNA, 79 bp, homo sapiens
caacaagtctctaggaagttccaaaccttcccacatctttctgtcttctgagcccaccaagtctctaggaagttccaaa

SEQ ID NO: 9372 - DNA, 85 bp, homo sapiens
tctctactaaaaatacaaaaatttgagtttgagaccaacccggcccacatggcgaaacctcatctctactaaaaatacaaaaatt

SEQ ID NO: 9373 - DNA, 88 bp, homo sapiens
gtattttatatccaagatctgatttttccaagttctttggttcttgaaggtttatatccttgtattttatatccaagatttgattttt

SEQ ID NO: 9374 - DNA, 123 bp, homo sapiens
ggggaggctgcccgactcctgggcaatgatggagagccaggaggcggcgtcaggtgcagagaagaaatagcagggagcggggaggctgcccgactcctgggcagtgatggagagccaggaggc

SEQ ID NO: 9375 - DNA, 115 bp, homo sapiens
gcttgtcagggttgctcagtgctggcccatgtcatgggtatcccactgccagccctgggaagaaggggcgtgggggcagactggcttgtcggggttgctcagtgctggcccatgt

SEQ ID NO: 9376 - DNA, 142 bp, homo sapiens
atgggtccacttccccctcaggcctcagtttccacttttgtaaaacaatggccctggctctgcttcctccgcccacaaaccatcactgtgaccctgatgggtctacttccccctcaggcctcagtttccacttttgtaaaac

SEQ ID NO: 9377 - DNA, 106 bp, homo sapiens
ctgtctctactaaaaatacaaaaattagccaggcatagtggtgggcggctgtaagcctgaccaacatggagaaacactgtctctactaagaatacaaaaattagcc

SEQ ID NO: 9378 - DNA, 108 bp, homo sapiens
cggtggctcacacctgtaatcccagcactttgggaggccgaggctggtggatcacaaggtcaagagatcaagaccggccaggcacggtggctcacacctgtaatccac

SEQ ID NO: 9379 - DNA, 114 bp, homo sapiens
agatttgggaagtgcgggcagtgggactgactgccttggtggtgtggggaggggcccagaagggggcaggtgggtggggaggggcccagatttgggaagtgcgggcagtgggac

SEQ ID NO: 9380 - DNA, 150 bp, homo sapiens
aatgacctgcattataacccctgtgatggggtagagagacctgctttataacctctgtgaaggggtagagagacctgcattataacccctgtgaaggggtagagacctgcattataacccctgtgaaggggtagagacctgctttataac

SEQ ID NO: 9381 - DNA, 110 bp, homo sapiens
cagcctcctgagtagctgggattacaggcactcaccaccacacccagctaatttttgtgtttttagtagagacgtggtttcaccagcctcctgagtagctggaattacag

SEQ ID NO: 9382 - DNA, 451 bp, homo sapiens
cacgcacagcatgccacacagacacccacaatacacataaacacacataccatgccacacagatccacacaatatcacatacatatgccatacagaccctcacaatatatacacacacaccacgccacacagaccctcacaatatatacacacacgccacacagacacccacaacacacatacacacaccccatgccacacaccatactgcacagacacccacaatatacacatacacacaccatgtcacacagatgcagagtacatatgcacacacaccatgacacacagacacccacacaatacacacacacaccatgccacagacagaagacacacacacaccatgccacacagacgcccacaacacgcgcacacacacacacacacactccatgccacaccatgctgcagacccacacaatatacacacacaccatgccacagatac

SEQ ID NO: 9383 - DNA, 89 bp, homo sapiens
cctccaggaccctaacaaggagtggcctcccgctacggggcagtagccccagggcctcctccaggacccctaacaaggagtggcctccc

SEQ ID NO: 9384 - DNA, 91 bp, homo sapiens
aatatcactgtataagagaacaaaatcagaatatcactttataataaatattaagtattatattaaaatatcactgtataatagaacaaaa

SEQ ID NO: 9385 - DNA, 110 bp, homo sapiens
ggcctcccaaagtgctgggattacaggcgtgagccaccgcgcccggcctcgaattcctgacctcaggtgatctgcctgccttggcctcccaaggtgctgggattacaggc

SEQ ID NO: 9386 - DNA, 107 bp, homo sapiens
aagacaagcctggccaacatggcaaaacccagcactttgggaggccgaggcaggcagattgctttgagctcaggagttaagacaagcctggccgacatggcaaaacc

SEQ ID NO: 9387 - DNA, 97 bp, homo sapiens
gataactagaaacgtacgtgtgtgtttgagtttggtctcgctgtgtgcatgtgtgtttttgagactgggtctgataactggaaacgtacgtgtgtgt

SEQ ID NO: 9388 - DNA, 104 bp, homo sapiens
ctgggattacaggcgtgagccaccgcgtctggcagaactcctgatatcaagttatccacctgcctcagcgtcccaaagtgctgggattacaggtgtgagccacc

SEQ ID NO: 9389 - DNA, 272 bp, homo sapiens
attttttagtagagacagagtttcatcatgttggccaggctggtctcgaactcctaacctctggtgatctgcccgcctcagcctcccaaagtgctgggattacaggcgtaagctaccacgcacagccttaatttttgtatttttagtagagacggggttttgccatatttgtcaggctggtcttggctcactgcaacctccatctcccggattgaagcgatttttatttttagtagagatggggttttgccatatttgtcaggctggtcttg

SEQ ID NO: 9390 - DNA, 132 bp, homo sapiens
ggcctcccaaagtgctgggattacaggcgtgagccagcgtgcccagcctggccaggctggtcttgaactcctgacctcaagtgatccacccaccttggcctcccaaagtgctgggattacaggtgtgagcca

SEQ ID NO: 9391 - DNA, 126 bp, homo sapiens
aggttgctaagatatatggtaagaaggaatcttcgaaccacaaaattgttaagggaaaaaattcattttagtttttttttttttttatgctgaggttgctaagatacatggtaagaaggaatcttc

SEQ ID NO: 9392 - DNA, 83 bp, homo sapiens
gaggttgaggcaggagaattgcttgaacccaaaaggtgaatcacccaaaaggtgaaccaaaaggttgaggcaggagaattgct

SEQ ID NO: 9393 - DNA, 96 bp, homo sapiens
aggtgggcagatcacctgaggtcgggagtttgagaccagcctggccaacgtggcaaaaccctgccaaggtgggcagatcacctgaggtcaggagtt

SEQ ID NO: 9394 - DNA, 77 bp, homo sapiens
gtttcgaacttcctagagacttggagggctcaaaagacaggaagatgtgggaatgtttggaacttcctagagacttg

SEQ ID NO: 9395 - DNA, 97 bp, homo sapiens
ggctgggtgcccctctgccagctgagggagcccacacagctcccaaccctaatgcctcctcccatagagcaggctggatgcccctctgccagctgag

SEQ ID NO: 9396 - DNA, 127 bp, homo sapiens
tcacctaggctggagtgcagtggcacggtcctagctcgctgctttatggcttttttttttttttttttaaagagacaaggtctggctctgtcacctaggttggagtgcagtggcacggtcctagctc

SEQ ID NO: 9397 - DNA, 131 bp, homo sapiens
gtggctcatgcctataatcccagcactttgggaggcctaggagggcggatcacttgaggtcagaagttcaagaccagccttgaggcggggcacggtggctcatgcctgtaatcccagcactttgggaggcc

SEQ ID NO: 9398 - DNA, 95 bp, homo sapiens
gcttgcctgtgcctgaggttcagcccggctgtcctcctcccagcgggcacaagtgtgccctgccccagtagcttgcctgtgcctgaggttcagcc

SEQ ID NO: 9399 - DNA, 100 bp, homo sapiens
tcctactccctgccttccccttcccccctctacactatggacatattagtctttttgagtcgtctttactccccttccactccctgccttccccttcccc

SEQ ID NO: 9400 - DNA, 80 bp, homo sapiens
cccatgtgaccaccacagcacaggctcggctaattgggtccatgtgatgggaaagatcccatgtgaccaccagagcacag

SEQ ID NO: 9401 - DNA, 123 bp, homo sapiens
ggcctctcctgggcctgcgtcctggggaggtgtggagttggggggctccgggaagggactctgctcgcctcatcgagggggcctctcctgggcctgcatcctggggaggtgtggagttggggg

SEQ ID NO: 9402 - DNA, 95 bp, homo sapiens
ccctcccgccagcccccagctcccgcgctaaaccattcatgagggatccgcccccatgagccaatccctcccgccagcccccagctcccgcgcta

SEQ ID NO: 9403 - DNA, 114 bp, homo sapiens
gcctgtaaccccagcactttgggaggccgagatgggtggatcgcctgaggtcaagagttcaagaccaggccgggtacggtggctcacgcctgtaatcccagcactttgggaggc

SEQ ID NO: 9404 - DNA, 112 bp, homo sapiens
gctgaggccagcctggatctacacttgtggtttgaatgacacgcctgcctgtccaccaggccctggctccttcctgcactgctgaggccagcctggatctacacctgtggtt

SEQ ID NO: 9405 - DNA, 106 bp, homo sapiens
ttgttcttaggttttcaagtccaggctgtagggcccctggtcacagaggacccgggtcacccgggactcatctttcacttattgttcttagtttttcaagtccagg

SEQ ID NO: 9406 - DNA, 92 bp, homo sapiens
cctttccagggcctcctctctgctgagagctgcagacatcaggatgaccagttacagagaggagtaccctctccagggcctcctctctgctg

SEQ ID NO: 9407 - DNA, 147 bp, homo sapiens
gatgaagggagaggaggcgtggggcagctctggggtaactgccttgcaggggatgaagggagaggaggcgtggggcagctctggggaaactgactcgcaggggtgccccggagatgaagggagaagaggcgtggggcagctctgggg

SEQ ID NO: 9408 - DNA, 87 bp, homo sapiens
tgggagaagtggatatcaaagaagccctccacatcgataaatgaggtaccagttgttaaccattggaagaagtggatatcaaagaag

SEQ ID NO: 9409 - DNA, 95 bp, homo sapiens
ggtaggagtacgggctgatcactcagggggatcgagacccagggtgcgggcgtggcaggctttccaggcagcggtaggagtacgggctgatgact

SEQ ID NO: 9410 - DNA, 109 bp, homo sapiens
ccttaaagcaggggttgactgggggccgcggcgcggggatgtgctggattgctggtctgtttgtgctgtcccttaaaacaggggttgactgggggccgcggcgcgggga

SEQ ID NO: 9411 - DNA, 143 bp, homo sapiens
agactcaggactggccaatcagaggccagggtaattggctggggggtaggggggggacaagactccaggactggccaatcagaggccacagtaattagctgagagaagggcatgtgactccagaactggccaattagagtcca

SEQ ID NO: 9412 - DNA, 114 bp, homo sapiens
aggtctgagagggcaggggtctccctgaccagcccctgccccgtagcccagggactgtcatttctcaggaggaaggtctgagagggcaggggtctccctgaccagcccctgccc

SEQ ID NO: 9413 - DNA, 112 bp, homo sapiens
aaatgaaaacatatcttcccacaaaacttgcacaaaaacttgtacatatggcccagcaatatcacatctagatatatacacaagagaaatgaaaacatatattcccacaaaa

SEQ ID NO: 9414 - DNA, 79 bp, homo sapiens
atgccttctctccctcacccgtcatatctggaacccagaacgtcagcaccaccgtgatgccttctctccctcacccgtt

SEQ ID NO: 9415 - DNA, 100 bp, homo sapiens
gggaggcagggagaagcagagtctcagccccggccacactgctgtctgaggcacccctggaggagtacagggaggcagggagaagcagagtctcagtccc

SEQ ID NO: 9416 - DNA, 77 bp, homo sapiens
agcaccaggacctgctgatattggacatgatggtgaggggagaaggcagagaaggaccaggacctgctgatattgga

SEQ ID NO: 9417 - DNA, 112 bp, homo sapiens
agggagtgatgtaggtagaggctgagctgcatgagaggggagtgtgagatcgtgtggacaataggtgaggacaggattctgggcacagggagtggtgtaggtagaggctgag

SEQ ID NO: 9418 - DNA, 92 bp, homo sapiens
agcacgggggatttttatgtggagcacaagggattttatgtggagcacagagaatttttatgtgaagcacggcggatttttatgtggagcac

SEQ ID NO: 9419 - DNA, 117 bp, homo sapiens
tgctgaatacacagcggcagctcagggaagcgcacagggtgtgagggccattggacatgcctttttgtgaggaggttgctgaatacacagcggcagctcagggaagcagcacagggt

SEQ ID NO: 9420 - DNA, 85 bp, homo sapiens
gcccctagagccgcccgcatgcagggaggggttgttgggcagtggggagaactgtcactcggcccctagagccgcccgcttgcag

SEQ ID NO: 9421 - DNA, 106 bp, homo sapiens
ccttactctccccatctgtggacgaggcatcctgaggtcgcccctgcagaggcgtggagatgtgtgtggctcattccctccttactctccccacctgtggacgagg

SEQ ID NO: 9422 - DNA, 104 bp, homo sapiens
catcgtaagatgggctgctgtggtgtcccctccccaccagggctgctctgagggccctggtcctgatttggacatcataagatgggctgctgtggtgtcccctc

SEQ ID NO: 9423 - DNA, 105 bp, homo sapiens
cccgcagctccgtctgggaagtcctggaggcagcgtgcacagtgggcccttgctatctgtaatcgggtggccttgtccacgcccgcagctccgtctgggaggtcc

SEQ ID NO: 9424 - DNA, 112 bp, homo sapiens
agattctctaaatagggtgctctgcttgcagaacgggggcgggggatgagcaggtggagtgggaggctgcaaattccagattctctaaatagggggctctgcttgcagaacg

SEQ ID NO: 9425 - DNA, 89 bp, homo sapiens
agcctctccgtgtcccgtcacgtaggcacggcggctctggagggaagggggtggtctccttgctctagcctctccatgtcccgtcacgt

SEQ ID NO: 9426 - DNA, 94 bp, homo sapiens
tggagcagaagtggcgcttgagcacagttgctgtttgctgacggtggctggatgtggctcggactctttggagcagaagtggcgcttgcgcaca

SEQ ID NO: 9427 - DNA, 147 bp, homo sapiens
gggtccagacgtctgtggtcacagtgtctgctgggccgtgctcccgcaggaggcagcagcagagggtcctccctgcctcctcctgccattcttccggttcgggggtccagacgtctgtggtcacggtgtctgctgggccgtgctccc

SEQ ID NO: 9428 - DNA, 120 bp, homo sapiens
ggtgctctgagatctggaacctaatgctccacccccatcacttcctccctcctgccttccatggcagggatacccagagctcagtcctgggtgctctgagatctggaacctgatgctcca

SEQ ID NO: 9429 - DNA, 120 bp, homo sapiens; identical to SEQ ID NO: 9428

SEQ ID NO: 9430 - DNA, 103 bp, homo sapiens
ccctgaccatggcatcatggccctaggattgggtgagtgctcctcgtcaacgctccagaatagggcgctcctgcccctgactatggcatcatggccctaggat

SEQ ID NO: 9431 - DNA, 84 bp, homo sapiens
cagacggggaccagctcaggatctcgggggcatctgtgggtctgccccggcccggggcccagacggggagcagctcaggatctc

SEQ ID NO: 9432 - DNA, 99 bp, homo sapiens
gacatccaagcctgccccagccactccagccccaccacagagtgaccgtgagccctgtgcaaggaagtcaaccatggacatccaaccctgccccagcca

SEQ ID NO: 9433 - DNA, 119 bp, homo sapiens
gccatgtgctgaagtgcactggcctgtgtgtaggatttggaaggttggcacggacgctctggaggggtgtgtgtttctctccgccatgtgctgaagtgcactggcctgtgtgtaggatt

SEQ ID NO: 9434 - DNA, 106 bp, homo sapiens
actgaggttagatgagccgacaagtctgctcagcatttcggactcccagcaccatcccaactccccagccccctgcacagacagtgaggttagatgagccgacaag

SEQ ID NO: 9435 - DNA, 103 bp, homo sapiens
ctgggaagggttcaagaggtggagtttcctggttgattgttgatgtctgccagggggcagccctgaggacccaactgggaagggttccagaggtggagtttcc

SEQ ID NO: 9436 - DNA, 123 bp, homo sapiens
gagtctccgcaggcagggcctcctggaggctctaggggagaaacaacactcatttattcatttacaggtccagagatcagaagtccagcatgagtctcggcaggcagggcctcctggaggctc

SEQ ID NO: 9437 - DNA, 77 bp, homo sapiens
tgtgtgttgggtgaaggcagagggcatcgctcttgagtcttacctaccccattgtgtgttgggtgaaggcagagggc

SEQ ID NO: 9438 - DNA, 109 bp, homo sapiens
ccatcatgagaaatgccagggagctgaggcagcagctgtccatccaccctctccctgctggggaaggtcaccagtactgccccatcatgagaaatgccggggagctgag

SEQ ID NO: 9439 - DNA, 103 bp, homo sapiens
aataggattaaaaatggcccaattatcagattctgaccagatgatccttccccctgcggccccagcctatcatttcataataggattaaaaatgacccaatta

SEQ ID NO: 9440 - DNA, 142 bp, homo sapiens
ggccttctctccagccccgggtgcacccacggttatcagggacccagcactgcctccctgcacgcacatggctctccaggccaccactgcagagtccggccttctctccagccccgggtgcacccacggtgatcagggaccc

SEQ ID NO: 9441 - DNA, 122 bp, homo sapiens
tgcggaggaacaaacacagacgatgacggggacagaggttgccggtttctagaaagtggctgttgggcacagaggaagcttgggctctgcggaagaacaaacacagacgatgacggggacag

SEQ ID NO: 9442 - DNA, 91 bp, homo sapiens
accgagaggcagataccctgcttgccgctcccgcatttgaaggctggtgggaatcggggataccgagaggcagataccctgcttgccgctc

SEQ ID NO: 9443 - DNA, 92 bp, homo sapiens
ttctggagacaaggtgccgcccatgtacacagacgcaccaaggacctcacacgccaggaccgttctggagacaaggtgccgcccactgtaca

SEQ ID NO: 9444 - DNA, 90 bp, homo sapiens
gcccgggaggcacccacacagggcctcccggtgccacccgcagcagccaactcatgcacccacaccgcccgggaggtacccacacagggc

SEQ ID NO: 9445 - DNA, 83 bp, homo sapiens
ccagcagtgatggactctcctgggcctgagccccgggtccttccccagcacccacagggcccggcagtgatggactctcctgg

SEQ ID NO: 9446 - DNA, 93 bp, homo sapiens
atccccccattcccctgatctccaggttagggaagggcacctgggcgagtggcagcctgcatccccccatgcccctgatctccaggttaggga

SEQ ID NO: 9447 - DNA, 102 bp, homo sapiens
gggggagggggtgggtggggacctggggcttgagggtgaactgtgggggaggggaggggcccagggggagggggctgggtggggacctggggcttgagggtg

SEQ ID NO: 9448 - DNA, 85 bp, homo sapiens
aggccacagcaactccggctgctgctgggcagggaagctccccacttccatccagaccaggccacagcaactccagctgctgctg

SEQ ID NO: 9449 - DNA, 114 bp, homo sapiens
cctccatctccctcaccacccgccaagccagagggcccctcacctgggatggtcacggggccccgcctggctggtcctccagctccctcaccacccgccaagccagagggcccc

SEQ ID NO: 9450 - DNA, 90 bp, homo sapiens
ggacttgggtctagtgttgctgagggtggatctgcagaggtgagagaaatgacccctttggacttgggtctagtgttgctgaaggtggat

SEQ ID NO: 9451 - DNA, 303 bp, homo sapiens
aaaatcaaaaaaaatggaaacaaataagagagaaagaaagaaagaaagaaggaaagaaagaaaagaaaagaaagaaaagaaagaaaaagaaagaaagaaagaaggaaggaaggaaggaaaagaaagaaagaaagaagaaagaaagaaaagaagaaagaaaaagaaagagaaagaaagaaagaaaagaaagaaaggaaggaaggaaggaaggaaggaagaaagaaagaaagaaagaaagaaagaaagaaagaaagaaagaaagaaagaaagaaagaaagagaaagaaagaaagaaaagaaaaaa

SEQ ID NO: 9452 - DNA, 388 bp, homo sapiens
catctcaaaaaaaaaagaaagagagaaagaaagaagaaagaaaaagaaagaaagaaagaaagaaagaaagaaagaaagaaagaaagaaagaaagaaagaaagaaaggaaggaaggaaggaaggaaggaaggaaggaaggaaggaaggaaggggaagggaagggaaggaaggaaggaaggacggacggaaggaagggagagaaagaaagaaagaaagaaggaaagaaagaaagaaagaaagaaagaaagaaagaaaggaaggaaggaaggaaggaaggaaggaaggaaggaaggaaggaaggaaagaaagaaagaaagaaagaaagaaagaaagaaagaaagaaagaaagagaaagaaagaaggaaagaaagaaagaaaaagaaaaaaa

SEQ ID NO: 9453 - DNA, 239 bp, homo sapiens
cacatcctgctgattggtccattttacagagcactgattggtccattttacagagtgctgattggtctgttttacagagtgctaattggtctgtttcacagagtgcttattggtgcgtttccaatcctttagctagacacaaaagttctgcaagtccccacccaattagctagacacagagtgctgattggtgcgtttacaaacctttagctagacacagagtgctgattggtgcattt

SEQ ID NO: 9454 - DNA, 111 bp, homo sapiens
ccccaccctgttggaatcttccagggctgagggtctcctatgtcctcaaatgctaccaggagacggagaccccagctggaccccaccctgttggaatcttccagggctgag

SEQ ID NO: 9455 - DNA, 97 bp, homo sapiens
atatatggttttaatgttatatatataaggttttaatgttatatataaatgttttatatttatatatgacatatataacattttaatgctatataca

SEQ ID NO: 9456 - DNA, 99 bp, homo sapiens
tttccagccagaaaatcgtaccatttcctttccttcgactgccgcttcccgacccctttccccgtttccggccagaaaatcgtaccatttcctttcctt

SEQ ID NO: 9457 - DNA, 117 bp, homo sapiens
cattaattaaaaaaaaaatttgtagagatggggttttgctatgttgcccaggctggtctcaaacccagagcaccaccgtgcctcattaattaaaaaaaaaattttgtagagatgggg

SEQ ID NO: 9458 - DNA, 197 bp, homo sapiens
agtcgtgtctacacctgaactctctgggattgagatggaggaggtggtgtccacaccctcacccactggggctgccatggaggaggaggagggaggtgtccacactctccaccctggggttgggatgatggaggaggaagaggaggggtggtgtccacaccctcaaccactggggctgccatggaggaggaggaggg

SEQ ID NO: 9459 - DNA, 175 bp, homo sapiens
ctgtaaccccagcacttggggaggctgaggcgggcagatcacctgaggtcaggagttcgagaccagcctgaccaacatggtgaaaccccgtctgtactaaaaatacaaaaattagccgggtgtggtggagggcgcctgtaatcccagctactggggaggctgaggcaagagaatc

SEQ ID NO: 9460 - DNA, 267 bp, homo sapiens
ttgtcatcccagcactttgggaggccgaggcaggtggatcacctgaggtcaggagttcgagacaagcctgacccacatggtgaaaccccatctctactaaaaatacaaaaattagtcgggcatggtggcaggcatctgtaatcccagctactcgggaggctgaggcaggagaatcacttgaacccgggaggcggaggttgcagtgagctgggcgtgttggcaggtgcctgtcatcccagctactcgggaggctgaggcaggagaatc

SEQ ID NO: 9461 - DNA, 136 bp, homo sapiens
attatctgttggggagaagagacgttgcttccttccttcctctttaattttttaatttttttaatgtcaccctgtgcacagagcacccagtattatctgttggggagaagagacgttgcttccttcttcctctttt

SEQ ID NO: 9462 - DNA, 103 bp, homo sapiens
tgctgggattacaggtgtgagccactgcgcacggcccatgtgtagatttattaaatgcccctgttcggcctcccaaagtgctgggattataggtgtgagccac

SEQ ID NO: 9463 - DNA, 96 bp, homo sapiens
tttatttatttttgagacggagtcctgctctgtcacccaagctgtttgtttgtttgtttgtttgtttattatttttgagacggagtcctgctctgt

SEQ ID NO: 9464 - DNA, 110 bp, homo sapiens
ccatctgactatagcaaaccgtacactcaaggaaacctgaccataggggatgcatcattgagatgttaaaataaacatcatccatctgactatagcaaactgtacactca

SEQ ID NO: 9465 - DNA, 76 bp, homo sapiens
aagcctggagacccttcctcaccggtgcctctgcagtgcctgggaggaataaagcctggagacccttccccaccgg

SEQ ID NO: 9466 - DNA, 123 bp, homo sapiens
ggtctcgagctcctgacctcaggtgatccaccagcctgggccacttatttttagtagagacaggatttcgtcacgttggccaggccggtctcgagctcctgacctcaggtgatccacccgcct

SEQ ID NO: 9467 - DNA, 95 bp, homo sapiens
ttacgtgtgtgtcctgtaccagccacatcagcaggctgtttgctgcgtatttatggattgtttacgtgtgtgtcctataccagccacatcagcag

SEQ ID NO: 9468 - DNA, 123 bp, homo sapiens
gttggccaggctggtctcgaactgctgacctcaggtgatccgcccaccccagctaatttttgtatttttagtagacacggggtttcaccatgttggccaggctggtctcgaactcctgacctc

SEQ ID NO: 9469 - DNA, 103 bp, homo sapiens
ataaactctgcaattatctcagaagacttccagaaagaaacacatggtgagtaacatctatatttacataaactctgcagttatctcagaagacttccagaaa

SEQ ID NO: 9470 - DNA, 135 bp, homo sapiens
ttgaggactttctagaactaacggaagagtggaggactttctagaactgtctaacagaagagttgaggactttctagaactgtctatggaagaattgaggactttctagaactaacggaagagtagaggactttc

SEQ ID NO: 9471 - DNA, 81 bp, homo sapiens
ccctgcagagactcctcataaaccactgtctgttctgagggttccacagcctctgtccctgcagagactcgtcataaacca

SEQ ID NO: 9472 - DNA, 85 bp, homo sapiens
ggcccaaagaagggctcaaggtcaacagtaagcgttgcaatgaccttaagcactcagcgaggctcaaagaagggctcaaggtcaa

SEQ ID NO: 9473 - DNA, 102 bp, homo sapiens
ggagaggaggttgaggtaggatgcaggttggtacagaaatagagaacagactagtaattctcaggggttcaggacgggagaggaggttgaggtaggatgcag

SEQ ID NO: 9474 - DNA, 112 bp, homo sapiens
aatgcactccagcttgggtgacagagtgagaaccccgtctctaaaaaaaataaacttaggaaaataaaataaataataaaaaatgcactccagcttgggtgacagaatgaga

SEQ ID NO: 9475 - DNA, 101 bp, homo sapiens
gccactgcagtccagcctgggtgacagagcgagacaagaaagcagaggttacagtgagccaagattgtgccactgcactccagcctgggtgacagagcgag

SEQ ID NO: 9476 - DNA, 127 bp, homo sapiens
atgcattatttacaaataccgttttctaggaggattggacccattgatctgcatccccatccttgccatctaaaattaccaaaatgcattatttacaaataccgttttctaggaggtttggacccat

SEQ ID NO: 9477 - DNA, 100 bp, homo sapiens
ttgcccaggctggagtgcagtggttcaatcatggactgcagcctttttttttttttttgagatggagtctagctccattgcccaggctgcagtgcagtgg

SEQ ID NO: 9478 - DNA, 80 bp, homo sapiens
ttacataagatgacatagacaaatggaacacagcaaaaaatgcaaggaatctgcatgttacataagataacatagacaaa

SEQ ID NO: 9479 - DNA, 99 bp, homo sapiens
gccatttgtaacacaataaacaaatccacagcaaggctcaacagacagaagaaaaggcaaataaattgatttataggccatttgtaacacaataaagca

SEQ ID NO: 9480 - DNA, 95 bp, homo sapiens
ggttgcagtaatttaaatacatactatgtatttaatcatattaatagtaatagtaatcatattactatggttgcagtaattaaatacatactatg

SEQ ID NO: 9481 - DNA, 95 bp, homo sapiens
aaagaacaaaggcatttctatgttgcatcttttttccttatcagtgtagctgggggcacgtcttaagcacaaagaacaaaggcatttctatgttg

SEQ ID NO: 9482 - DNA, 103 bp, homo sapiens
tttttttttcagtacttagattaccacgtgatgagaaggatataagtaggctaaactctttttcaggcagccagtgatttttttttcagtatttagattacca

SEQ ID NO: 9483 - DNA, 102 bp, homo sapiens
acatgatatggcaataggcttacaggaaaagcgaaatattattttataaaatagtcactctctaaataatgattatatacatgatatggcaataagcttaca

SEQ ID NO: 9484 - DNA, 144 bp, homo sapiens
tattgtgattttttattgtgaactcatcttcaggagggtttttcagtgggaattgtgttgtgccttttgaccttcatgagcattgggttgtgacttcactatattgtgatttttttattgtgaactcatcttcaggagggtttt

SEQ ID NO: 9485 - DNA, 133 bp, homo sapiens
caacatcatgttcttttcagcaacatggttgtagctagataaagaaaatgtggtgcatatggaccatgaaataatacacagtcataaaaaagagcaacatcatgttcttttcagcaacatggttgtagctaga

SEQ ID NO: 9486 - DNA, 125 bp, homo sapiens
ataagtgtccatgaaatcttcacaatttatgttcagagattgcagtaaagacaggcgtaaaaaaatataaaagtattaatttggggaactaataaatgtccatgaaatcttcacaatttatgttc

SEQ ID NO: 9487 - DNA, 74 bp, homo sapiens
gaaatattaaaaagtaatttataaagactggataatttgtaaagaaaaatgaaatattaaaaataatttataaa

SEQ ID NO: 9488 - DNA, 100 bp, homo sapiens
tgccctctgccttggacaagtcattgctctctgtccttgcacaagccattgccctctgcctttccacaagccactgccttctgccttggacaagtcattg

SEQ ID NO: 9489 - DNA, 111 bp, homo sapiens
tgggcaacatggcaaaaccccatctctactaaaaatacaaaaattagccgggtgcacggctcgagaccagcctgggcaacatggcaaaaccccgtctctactaaaaataca

SEQ ID NO: 9490 - DNA, 103 bp, homo sapiens
tgctacaaaaacttttcagtgacaaaaatggctttgctttgctacaaaaatttttcagtgacaagaatggatttgctttgctacaaaaatttttcagtgacaa

SEQ ID NO: 9491 - DNA, 78 bp, homo sapiens
gtgtttgggttataatacataactaattctgtttaattctgtttttttctctacgtgtttgggttataatacataact

SEQ ID NO: 9492 - DNA, 114 bp, homo sapiens
gcatgctcgacttcctgcctccctaccgcgagcgcttcacctgcgcttcacaccctggttgcgagagggccgcatgctcgacttcctgcctccccaccgcgagcgcttcacctg

SEQ ID NO: 9493 - DNA, 234 bp, homo sapiens
accaatccacactctgtatctagctactctggtggggccttggagaacctttatgtctagctcagggattgtaaatacaccaatcacactctgtatctagctcaaggtttgtaaacacaccaatcagcaccctgtgtctagctcagggtttgtgaatgcaccaatccacactctgtatctagctactctggtggggccttggagaacctttgtgtccacactctgtatctagct

SEQ ID NO: 9494 - DNA, 179 bp, homo sapiens
ggattcctgtgctccatacccacacatgatctgactctgcccgtctccttctgtctttctgagcctcatacccacatatgacctggttctgcccatttgcctgggccttcctgagcctcacacccactgatgatctgtatcttgtcacctcttcctgtcttcctgagcctcacacccac

SEQ ID NO: 9495 - DNA, 125 bp, homo sapiens
gaacataaattgggaagatttcatggacatttattagttccccaaattaatacttttataatttcttacacctgtctttactgcaatctctgaacataaattgtgaagatttcatggacatttat

SEQ ID NO: 9496 - DNA, 111 bp, homo sapiens
aagtacaaaataaatatccatgagtccaaactgttatgaataaataattgaatacaatccaagcagtattggattataacccaaagtataaaataaatatccatgagtcca

SEQ ID NO: 9497 - DNA, 129 bp, homo sapiens
gtcacctttcagattttgagtgtgagtcaaacaccaacatctcaataagccccttcactatgcggtaccttcaaagaaattagccagctcaacagtcacctttcagattttgagtgtgagtcaaacacc

SEQ ID NO: 9498 - DNA, 73 bp, homo sapiens
caaagccagaggactgacactacctaacttcaagaattactatagagaccaaagccagatgactgacactacc

SEQ ID NO: 9499 - DNA, 97 bp, homo sapiens
tccttagaaatttaaatgcattcagaggctctcttagtgcagtgggcagcgcgtcagtctcataatctgaaggtcctaagaaatttaaatgcattca

SEQ ID NO: 9500 - DNA, 81 bp, homo sapiens
atcaccatatatgtgtgataataagttatataagttatgtgtgatataagttatataaatcaccatatatgtgtgataata

SEQ ID NO: 9501 - DNA, 102 bp, homo sapiens
ccactgcactccagactgggcaacagagcgagactccgtctcaaaaaaaaaaaaaatgtgaaccaagatcgtgccactgcactccagcctgggcaacagagc

SEQ ID NO: 9502 - DNA, 75 bp, homo sapiens
gttcctgccttaactgatgacattccaccacgaaagaagtgaaaatgacctgttcgtgccttaactgatgacatt

SEQ ID NO: 9503 - DNA, 100 bp, homo sapiens
gcttaggaaatagaggtttcttaccccagagtaggaattacaagctggagttccagctcaggacattgatgcttaggaaatggaggtttcttaccccaga

SEQ ID NO: 9504 - DNA, 74 bp, homo sapiens
aggagttaccttggaatacgggtggtcgagattcatacagtaagtaagagaggagttaccttggaataggggtg

SEQ ID NO: 9505 - DNA, 112 bp, homo sapiens
tatcaattatattacttatatatttatgtatatatgcaacaaaatgttcagcttattttaaaaaatctgtctacaaattaagtatcaattatattacttatatatttgtgta

SEQ ID NO: 9506 - DNA, 90 bp, homo sapiens
aatatgacctctgtataatatgacctctgtataatggcccctatgttgacctctgtataatatgacctttgtataatggccccaaatatg

SEQ ID NO: 9507 - DNA, 102 bp, homo sapiens
gaaatagtcaggggctgtagataaataagagaaggaaggagagagaaaatttcccagttgacctgggaaatagtcaggggctgtagataaataaggaaggag

SEQ ID NO: 9508 - DNA, 108 bp, homo sapiens
gatgaaaattttaaaatcattaattcaatcatcaattcaattcaatcatctttttatcctttaaaagacctcacacattgatgaaaattttaaaatcattaattcaat

SEQ ID NO: 9509 - DNA, 75 bp, homo sapiens
aatgtcgtcagttaaggcaggaacaggccattttcacttcttttgtggtggaatgtcatcagttaaggcaggaac

SEQ ID NO: 9510 - DNA, 125 bp, homo sapiens
gaacataaattgtgaagatttcatggacatttattagttccccaaattaatacttttataacttcttatgcctgtctttactacaatctctgaacataaattgtgaagatttcatggacacttat

SEQ ID NO: 9511 - DNA, 67 bp, homo sapiens
aacacaccagcagaagagcacacaagcggcaggacatctagagaagcagaggggcagaaaaacacac

SEQ ID NO: 9512 - DNA, 78 bp, homo sapiens
ggggatgatggtacccattttgaagagatctacccaaggcagggatatagggaggggaatgatggtacccattttgaa

SEQ ID NO: 9513 - DNA, 81 bp, homo sapiens
cgttactatagcctatagttattatagcctatagttaatgactataacattactataacgttactatagcctatagttaat

SEQ ID NO: 9514 - DNA, 151 bp, homo sapiens
attgtaaaacacaccaatcagcgctctgtgtttagaggtttgtaaaatgcaccagtcagcactctgtggctagctagaggtttgtaaaatggaccaattagcactctgtaaaatggatcaatccatgctctgtaaaatggaccaatcagtg

SEQ ID NO: 9515 - DNA, 109 bp, homo sapiens
gggtttcaccatgttgtccaggctggtcttacaggcatgagccaccacgcccagcctgatttttgtatttttagtagaaacggggtttcaccatgttggccaggctggt

SEQ ID NO: 9516 - DNA, 87 bp, homo sapiens
cctcacaattatgtactccatgaggtaggaaagatcccgaaatatgctcatttgcaaccaagtacctcacaattatgtacttcatga

SEQ ID NO: 9517 - DNA, 83 bp, homo sapiens
tgggaaagtttggaacttcctagagacttggaggcctcagaagaaaggaagatgtggggaagtttggaacttcctagagactt

SEQ ID NO: 9518 - DNA, 78 bp, homo sapiens
accacagaggacatttctatatgaattatgaatataaatcaataaaccttgatcaccacagaggacatttctatagga

SEQ ID NO: 9519 - DNA, 127 bp, homo sapiens
caatttatgtgctaaggtaaactggcagaagaaagcattatacttaagttaacattattaccattatacctactgtcttaaacactaaaagcaatttatgtgcaaaggtaaactggcagaagaaagc

SEQ ID NO: 9520 - DNA, 154 bp, homo sapiens
aaaaaaattagtgttccttttcagatttctttaaaaggaataaaacagttctctgcagagactatacttgcataggcctaaatttatggtaagagtactgaaaaaaattagtcttccttttcagatttctttaaaaggaataaaacagttctct

SEQ ID NO: 9521 - DNA, 81 bp, homo sapiens
tgtacccacaaaaattaaaaataaaaattagaaaacaaatatgtacaactgctatgtacccacaaaaattaaaaattaaaa

SEQ ID NO: 9522 - DNA, 127 bp, homo sapiens
atatacttcactttaatctaatagataagaacaaaataattttgtaatagacactcctagaaaactattctgtctcttaattatatatacttcactttaatctaatagataagaacaaaataatttt

SEQ ID NO: 9523 - DNA, 105 bp, homo sapiens
atgtgaatctacatgtagttgtaagtacatgacctcataagtatttattagatatttgcttcttacaactatatgtgactctacatgtagttgtaagtacatgac

SEQ ID NO: 9524 - DNA, 108 bp, homo sapiens
tggctaatttttttgtatttttagtagagacagggtttcaccgtcttagccaggatggtctcaatctcctgaccatgtgtggctaatttttttgtatttttagtagag

SEQ ID NO: 9525 - DNA, 108 bp, homo sapiens
caccaatcggcactctgtatctagctcaaggtttgtaaacataccaatcagcaccctctctttagctcaaggtttgtgagtgcaccaatcgacactctgtatctagct

SEQ ID NO: 9526 - DNA, 77 bp, homo sapiens
caaaccaccatggcatatgtttacctatgtgacacgtgtttacctatgtgacacaaaccaccatggcacatgtttac

SEQ ID NO: 9527 - DNA, 100 bp, homo sapiens
taaactgacttagcaggtttcttgctaaaggcaggccacagtgatcacacatcaagggtgggaggattcacattaaactgacttagcaggattcttgcta

SEQ ID NO: 9528 - DNA, 110 bp, homo sapiens
gtcctctttgtggtctaagtggaaaggtgagggtgcaggtttttgagaatgcattggtaagggccactaaattcgaccttcctcagtcctctttgtggtctaagaggaaa

SEQ ID NO: 9529 - DNA, 66 bp, homo sapiens
gctagatacagagtgttgattggtgcattcacaaaccctgagctagacacagggtgctgattggta

SEQ ID NO: 9530 - DNA, 76 bp, homo sapiens
ttgttaaaactatagttttaacaattattttttaacaatacaattaatgtgttgttaaaactatagttttaacaat

SEQ ID NO: 9531 - DNA, 92 bp, homo sapiens
acacagtctcagaaaaggaaaagagaagtagtgtgtagattaattcttaacacttggccatacgcagacacagtctcagaaaaggaaaagag

SEQ ID NO: 9532 - DNA, 126 bp, homo sapiens
tatattaacttaaaatgaattattatcatagaaactaaaatgttcaaacatgacaagggaagccaaattattataaaaatagaactataatatattagcttaaaatgaattattatcatagaaact

SEQ ID NO: 9533 - DNA, 84 bp, homo sapiens
tagtccagaaagaatctcaaaatataaagtgacaaaatatataacttatggcatgtagtccagaaagaatctcaaaatataaag

SEQ ID NO: 9534 - DNA, 89 bp, homo sapiens
ggtctcttctctcccctgagttgttattgtcctaaagttccctgatactttgttcattttctgccaggtctcttttctcccctgagttg

SEQ ID NO: 9535 - DNA, 135 bp, homo sapiens
aaaaataatatagtaaatatatatattatatataataaatatagtataactgaacgaataaaataataaaatgtatagacagtaaaaataatatagtcaatatatattatatataataaatatagtataactgaa

SEQ ID NO: 9536 - DNA, 89 bp, homo sapiens
tgagtgggttgtcttggacgtctgagcctttacagttccctgctgacagccagagtcaactgcaattgagtgggttgtcttggacatct

SEQ ID NO: 9537 - DNA, 75 bp, homo sapiens
gttactgccttaactgatgacattcctccaaaaaagaagtgaaaatggcctgttcctgccttaactgatgacatt

SEQ ID NO: 9538 - DNA, 76 bp, homo sapiens; identical to SEQ ID NO: 1998

SEQ ID NO: 9539 - DNA, 98 bp, homo sapiens
gaaagaggcagctcaatacctgctcaatcagaagaagaagaagaagaagaagaggaggaggaggaggaggaaagaggcagctcaataactgctcaatc

SEQ ID NO: 9540 - DNA, 114 bp, homo sapiens
tcatccacctggcaggtcttccaaaggcttcaatttattaagtagaattgtattctactcatccactgggtagaatataccatattcatccacctggtaggtcttccaaaggct

SEQ ID NO: 9541 - DNA, 113 bp, homo sapiens
atacagaaatcaactcaagatggattaaaggcttaaattgcagaagattggaactggaccctttccctataccatatacagaaatcaactcaagatggattaaagacttaaat

SEQ ID NO: 9542 - DNA, 76 bp, homo sapiens; identical to SEQ ID NO: 1318

SEQ ID NO: 9543 - DNA, 102 bp, homo sapiens
gtgagatctgaataaggcatagattgtgttaatatcaatttcctggtttttatattgtgcatagctatgtaagatgtgagatctgaataaagcatagattgt

SEQ ID NO: 9544 - DNA, 111 bp, homo sapiens
aaagaaaatgtagtttttagtaggattccaagagcatttactttgtaatttgaatattttttaaccatgagaaaacttgctttgcaaagaaaatgcagtttttagtaggat

SEQ ID NO: 9545 - DNA, 96 bp, homo sapiens
aaagcaaccaatcagaggctgaagtagagttacataggacactctcctgtgcaaacatctgattggttgcaaaaagcaaccaatcagaggctaagg

SEQ ID NO: 9546 - DNA, 121 bp, homo sapiens
ctttctttacatctatcataaaggtccagtatgactttataaatgggccagcatagataaagcatttaaaaaacaattctttctttacatctatcataaaggtccagtatgactttataaa

SEQ ID NO: 9547 - DNA, 125 bp, homo sapiens
gaacataaattgtgaagatttcatggacatttattagttccccaaattaatacttttataatttcttatgcctgtctttactgcagtctctgaacataaattgtgaagatttcatggacatttat

SEQ ID NO: 9548 - DNA, 150 bp, homo sapiens
cattttacagagcgctgattggtccattttacagagtgctgattggtccgtttttacagagtgctgattggtgcatttacaaacttttagctaggcacagagcgctgattggtgtgtttttacagagtgctgattggtgcgtttacaaac

SEQ ID NO: 9549 - DNA, 106 bp, homo sapiens
ttcccttactttctcccaaaccgagtctctctctgttcagaaccacctgaagctgggggtggttgtgttctgttcccttactttctcccaaacagagtctctctct

SEQ ID NO: 9550 - DNA, 125 bp, homo sapiens
gaacataaattgtgaagatttcatggacatttattagttctccaaattaatatttttataatttcttacgcctgtctttactgcaatctctgaacataaattgtgaagatttcatggacacttat

SEQ ID NO: 9551 - DNA, 94 bp, homo sapiens
cagctctcagcagagagaaggccctgcagttggttgttcctctctgcaggcaggttgtcttgtcatctttccagctctcagcagagaggaggcc

SEQ ID NO: 9552 - DNA, 102 bp, homo sapiens
ttttggaagcaagctaaaactccagaatgaaactactgccttccattgtcatgcaagcaggaaaacttgcctttctttttggaagcaagtaaaactccagaa

SEQ ID NO: 9553 - DNA, 108 bp, homo sapiens
gcagatgggcaacaagaaaataattacttgtttttaatataaaataataataagtaataataattaataataatattattacttgcagatgggcaacaagaaaaaata

SEQ ID NO: 9554 - DNA, 105 bp, homo sapiens
acacacacatgcagcttcatttactatcattagactcatttaattcatttttagaatctagcttaataatacacacatacacacacatgcagctttatttactat

SEQ ID NO: 9555 - DNA, 94 bp, homo sapiens
cactttagcctctgattggttgctttccacaaccaatcagatgtttgaatagggtgtaacctttgtaagtacacttcagcctctgattggttgc

SEQ ID NO: 9556 - DNA, 126 bp, homo sapiens
ccctagtttattgaactttgaacttaaggaaagaaaagccttggcctcccaaagtgctgggattacaggcgtgagccaccatgcctggccctagtttattgaactttgaacgtaaggaaagaaaag

SEQ ID NO: 9557 - DNA, 103 bp, homo sapiens
aatttgcttcaacctggatataacaggcaagaacaacatttataaaagcagctgaactgaccatttttaatggcatctaatttgcttcaacctggatataaca

SEQ ID NO: 9558 - DNA, 89 bp, homo sapiens
aggtacctagaaaaaaataatgtaagtgtgcaaggccatatcggtcataaagattaccaggtacctagaaaaatataatgtaagtgtgc

SEQ ID NO: 9559 - DNA, 276 bp, homo sapiens
tccgttttacagagagccgattggtctgttttacagagagctgattggtccgttttgacagggtgctgattggtgcatttacaaaccttgagctagatacagagtgccgattggtgtatttacaatcccttagctagacataaaggttctccaagtccccaccagagtagctagatacagagtgtcgattggtgcattcacaaaccctgagctagacacagggtgctgattggtgtgtttacaaaccttgagctagatacagagtgctgattggtg

SEQ ID NO: 9560 - DNA, 244 bp, homo sapiens
tctgtgaacttttggagggtctgcatctcaatatttgagtaattttaatttgtgggtctgtgctcagggtgtgaggtctgtgaattctttgagggtctgagtcccaaatctaaggtatttgtgtgtctctgttcatggggtgaatcttgaagtctttgagggtctgtattccaaggttttgagttggaagtgtttggttgtccgtgttgaaagtgtgaggtctctgaattgtttgagcgccttt

SEQ ID NO: 9561 - DNA, 214 bp, homo sapiens
tctctgaactctttgagggtctgtagtctaaatgttcagtttgaggtatttggaggtcttcggtcagggagtgagatctctgaagtctttgagggtctgtttcccacagctcgagtctattgtttttaggaccagtatagagagtacgtcttctctgaactcattcggagtctgtgttcagggtgtgaagtctcttaactcactgagggtctat

SEQ ID NO: 9562 - DNA, 95 bp, homo sapiens
gcatcaggccaggcacaggttactgtgattctagcactttgggagggtcccaggaccttacattttttaaatgcatcaggccaggcacagattac

SEQ ID NO: 9563 - DNA, 106 bp, homo sapiens
gccttggcctcccaaagtgctgggattaccatgttggccaggctggtcttgaactcctgacctcaagtgatacacctgcctcggcctcccaaagtgctgggattac

SEQ ID NO: 9564 - DNA, 84 bp, homo sapiens
gagttttgctcttgttacccaggctggctggctggctatctatctattttttgagatggagttttgctcttgttgcccaggctg

SEQ ID NO: 9565 - DNA, 125 bp, homo sapiens
ataaatgtccatgaaatcttcacgatttatgttcagagattgcagtaaaggcaggtataagaaattataaaagtattaatttggggaactaataaatgtccatgaaatcttcacaatttatgttc

SEQ ID NO: 9566 - DNA, 101 bp, homo sapiens
tgagccaaaaggataaagtctagggaaagcctagaaactgagttcagcaaccctaaaccatttactgtacttgtgagtcaaaaggataaagtctagggaaa

SEQ ID NO: 9567 - DNA, 96 bp, homo sapiens
tcttttattttttccaaatcagaataagaccctacctgatatccattctccctccttctttactcataattctttgattttttccaaatcagaata

SEQ ID NO: 9568 - DNA, 87 bp, homo sapiens
agttctatgatcacctacaaattacacttacccttttcttgtggtaaacactccatgagttctatgatcacctgcaaattacactta

SEQ ID NO: 9569 - DNA, 81 bp, homo sapiens
agataaagttactattctactcaaaaccagagggataaccattaaaggtaagtcagataaagttactattctactcaaaac

SEQ ID NO: 9570 - DNA, 86 bp, homo sapiens
ccagcaagttgtaaataccatcatgctttccttaccttttttgttcggttattttttaaccagcaagttgtaaataccatcatgct

SEQ ID NO: 9571 - DNA, 81 bp, homo sapiens
ataatgctgtttactgtcaaatagtaacacacatatataaaacaaggggatattataatgctgcttactgtcaaatagtaa

SEQ ID NO: 9572 - DNA, 100 bp, homo sapiens
agcctctgattggttgctttccacaaccaatcagatgcttgcatagggtgtaacctttgtaacttcacttcagcctctgattggttgctttccgcaacca

SEQ ID NO: 9573 - DNA, 76 bp, homo sapiens
ttttgtatttttagtagagatggagtttcaccatgttggccaatttttctaatttttgtatttttagtagagacgg

SEQ ID NO: 9574 - DNA, 101 bp, homo sapiens
tcagtctttttaactttagcccatctgcccattcttgttttttcttctttcttgttttctttctttctttcctcctcagtctttttaactttagcccgtct

SEQ ID NO: 9575 - DNA, 77 bp, homo sapiens
gtaatcacctttttttttttttgagagagagtctttctcctaaggtgtcatggtaatcactttttttttttttgaga

SEQ ID NO: 9576 - DNA, 137 bp, homo sapiens
agggggcagctcatttctgcaaccagggtgtcccactgagtgttcagctcctagcagagagggtagctcctctctacagcttgtcaccccatcatctgttccagctctcagccagagggtagctcctctctgcagct

SEQ ID NO: 9577 - DNA, 96 bp, homo sapiens
caaaaatgacatgcttgacaaaacatgcttcttgacaaagtattctattttatacttatcagattggcaaaaatgaaatgcttgacaaaacatgct

SEQ ID NO: 9578 - DNA, 74 bp, homo sapiens
gacagagtgagactccatctcaaaagataataataataataatttgctatgacagattgagactccatctcaaa

SEQ ID NO: 9579 - DNA, 107 bp, homo sapiens
tatgcacctgacactggagctcccaaatttataaaaatttataaatttttataaattatgaatttttataaattatgcacctaacactggagctcccaaatttataa

SEQ ID NO: 9580 - DNA, 143 bp, homo sapiens
aacatctgattgggttcttcatccccccacaatccctcaggtgatgtctgattgtctaagttggtttggccacagcccaacatctgaatggcctatccccaacatctgattggattcttcatccccccacaatccctcaggtg

SEQ ID NO: 9581 - DNA, 122 bp, homo sapiens
aaaaaatataattcaattcagtaagcattaagcatttgtttgtaagtagattgcttgggcctcaaaatactttcccaaagaaactttaaaaaaatataattcaaatcagtaagcattaagca

SEQ ID NO: 9582 - DNA, 87 bp, homo sapiens
agggagccaagaggttgcagtgagccaagagatctcaccactgcattctagcctgggtgacagggagcccagaggttgcagtgagcc

SEQ ID NO: 9583 - DNA, 99 bp, homo sapiens
cagcacagctggcgtagcacgccgacgcaccgccccgtcgcctgtgagctcgcggtgtggctcagcccagctggcgtagcacgccgacgcaccgccccg

SEQ ID NO: 9584 - DNA, 98 bp, homo sapiens
agctagatacacacacacatacacacacacacacacacacacacacacacacacacagagaacagctagctagatacacacacacacacacacacaca

SEQ ID NO: 9585 - DNA, 87 bp, homo sapiens
agctgacaccagcagggctgaaattacaggggcaggggcccaggataggtgttcactgagagagctgacaccagcagggccgaaatt

SEQ ID NO: 9586 - DNA, 88 bp, homo sapiens
cgggtctgcatgggcaggggattgaggggtcctcggagggtctgtgggcatctgtggggtacccacgggtctgcatggacaggggatt

SEQ ID NO: 9587 - DNA, 86 bp, homo sapiens
aatttgtgagcccccagtagcatcacgacatagcctgagaaacacttgaataaatacattaatttgtgagcccccagtagcatcac

SEQ ID NO: 9588 - DNA, 97 bp, homo sapiens
gattgtcatactagggaaatggccttttggcagctttgaactgtctcaggaaggcattttaaaagggctgagattgtcatcctagggaaatggcctt

SEQ ID NO: 9589 - DNA, 94 bp, homo sapiens
aaaagctgcttaacataagagacccttagatatttgttaaattattaaactgatctacctgaaaaagctgcttaacataagagacacttagata

SEQ ID NO: 9590 - DNA, 79 bp, homo sapiens
gagagggtactcctctctgcagctggttgtcccacctctccagagatcagcagagagggtactcctctctgcatctggt

SEQ ID NO: 9591 - DNA, 87 bp, homo sapiens
tttctagattgtcctctaggaagactaaacccagaaacacatactcttgtcacatttttctagattgccctctaggaagactaaacc

SEQ ID NO: 9592 - DNA, 80 bp, homo sapiens
cataaaatcttagggacaaatatccctggtggttgggtggctaggattcggcgctttcataaaatctcagggacaaatat

SEQ ID NO: 9593 - DNA, 117 bp, homo sapiens
tgtaatattaggaaatattttaattaaccctccacagtatataaaaatccatcatatcctggtagttttctagtcatgagagcatggtgtaatattaagaaatattttaattaaccc

SEQ ID NO: 9594 - DNA, 92 bp, homo sapiens
ttgtccaggatctgctctactcacctacaagaaagaaggtgcttctttttgccttccattttagccaattgtccaggatctgctctactcac

SEQ ID NO: 9595 - DNA, 104 bp, homo sapiens
tataggctgagttgtctctgctcaaaattcataccacgcccagccttattttaatactgtctttagtaccatataggctgagttgtgtctgctcaaaattcata

SEQ ID NO: 9596 - DNA, 109 bp, homo sapiens
tgctcgcagtccatttagaggcatttgcggtagacaatggaggggccagactcatcatacatacctgatggctaacccacatgcttgcagtccatttagaggcatttgc

SEQ ID NO: 9597 - DNA, 126 bp, homo sapiens
tgcagtgagccaagatcgtgccattgcactccagtctgggtgacaagagcaaaactccgtctcaaaaaaaaaaaaaaaattcaaaaattagctgcagtgagccgagatcgtgccattgcactccag

SEQ ID NO: 9598 - DNA, 94 bp, homo sapiens
ttacaaagttacaccctatgcaaacgtctggttgattataggaggggcccaatcagaggctgaagtgaagttacaaagttacacccctatgcaa

SEQ ID NO: 9599 - DNA, 114 bp, homo sapiens
gcaatgaactaccatgtcaattatgcttaaaatacatgactatcgggcttgaaaaggggggaattaagtatcggcaatgaactacatgtcaattatgcttaaaatacatgacta

SEQ ID NO: 9600 - DNA, 104 bp, homo sapiens
tgaatctctgaatagaccaataacaggctctgatacacatacaccctcccaagactaaacgaggaagaagttgaatctctgaatagaccagtaacaggctctga

SEQ ID NO: 9601 - DNA, 133 bp, homo sapiens
tgttaaaacctggaatgcagaacactttagcagataaaaggcaggatggaagagattggaaatgaggtatttttagtggttcttaaaaaattgttaaaacctggaatgcagaacactttagcagataaaaggc

SEQ ID NO: 9602 - DNA, 86 bp, homo sapiens
agggactgcactgaatctgacattttaattttttttttgagacagagtccggaattttgacagggactgcattgaatctgacattt

SEQ ID NO: 9603 - DNA, 98 bp, homo sapiens
gccaggcagaggcgctcctcacttcccagatggggcggccgggcagaggcgctcctcacttcccagatggggtggccaggcagaggcactcctcactt

SEQ ID NO: 9604 - DNA, 102 bp, homo sapiens
atatatgcatccaatatcagagtaacaatatgataaagaattgattcaaaaggaatatataacaattacaaacatatgtgcatccaatatcagagtaacaat

SEQ ID NO: 9605 - DNA, 124 bp, homo sapiens
ttatactttttatacatatatactaaaagtataaaaacatgcatgggaataaaatcaccaaatataaggcttaaaaatatatcagttatactatttatacatatatactaaaagtataaaaaca

SEQ ID NO: 9606 - DNA, 86 bp, homo sapiens
ctgtttactgggttgtcaccccatccaacaagagtggaacagtgtttttgtatccattccctgtttactgggttgtcaccccctcc

SEQ ID NO: 9607 - DNA, 89 bp, homo sapiens
ataagggtctaacaaagatcacatgcttctgagggaacaggacaaaggtcaaaagcagaaccactgataagggtccaacaaagatcaca

SEQ ID NO: 9608 - DNA, 86 bp, homo sapiens
gaggcctgaagcctgagatcagtgaatgagaccttgtttaagttagacgttgtggtactctatgaggcctgcagcctgagatcagt

SEQ ID NO: 9609 - DNA, 114 bp, homo sapiens
ggtccaggcaccctgttaaatgtgctgcctatggttgtgggcaatccttccgactcttttccctccctggttcctaggtccaggcaccctgttaaatgtgctgcccatggttgt

SEQ ID NO: 9610 - DNA, 95 bp, homo sapiens
gaatatcccatgataaaaactagaaacttctatatgtgagtacattaaagcctacatttaaaaaaaaccgaatatcccatgctaaaaactagaaa

SEQ ID NO: 9611 - DNA, 111 bp, homo sapiens
ttctgtctagtttttacgtgaagatatttccgttttcaccgtaggcctcaaagtgctcacaaaatattttctcagaacgtttctgtctagtttttatgtgaagatatttcc

SEQ ID NO: 9612 - DNA, 78 bp, homo sapiens
ataataaagtcagataataaagtcagataggcttgtttcattataggatgaataataaagtcagataggcttgtttca

SEQ ID NO: 9613 - DNA, 76 bp, homo sapiens
actctatacacacacacatatagtaatatatatacaactatatctatatatctatatatatgtatacacacacaca

SEQ ID NO: 9614 - DNA, 160 bp, homo sapiens
atcatatatatatatatatatatatatatatatatatatatatatatatacacacacacacatatatatatgatgctatatatatacacatatatatgatgccatatatatatatacacatatatgatgccatatgtgtgtgtgtatatatacatatata

SEQ ID NO: 9615 - DNA, 65 bp, homo sapiens
tctttgttcatatatcattttctttttttgaataatttatatctctttgttcacatatcattttc

SEQ ID NO: 9616 - DNA, 75 bp, homo sapiens
attggtttaaatcaaagcccccaaaaaaatgttattgagaattataaaacaactaattgatttaaatcaaagccc

SEQ ID NO: 9617 - DNA, 86 bp, homo sapiens
catgtcttgctgattggtccattttacagagtgctgattggtccattttgcaaacctctagctagctacagagtgctgattggtgc

SEQ ID NO: 9618 - DNA, 97 bp, homo sapiens
atgggaatagtgtaaggatggatttgttaaagttgacttcaaatttattacatagctacactgataaagacagtatgggaatagcgtaaggatggat

SEQ ID NO: 9619 - DNA, 79 bp, homo sapiens
cgctgcactccagcctgggtgactcagcctaggtgacagagagagtgagatcacatcactgcactccagcctgggtgac

SEQ ID NO: 9620 - DNA, 109 bp, homo sapiens
tgccaccatgcctggctaatttttgtattttgtattcctcctgcctcagcctcctgagtagctgggactataggtgcgtgccaccatgtctggctaatttttgtatttt

SEQ ID NO: 9621 - DNA, 93 bp, homo sapiens
tctgattggttgcagaaagcaacaatcagaggctgaagtgaagttacaaagtcacactcctatgcaaacatctgattggttgcagaaagcaac

SEQ ID NO: 9622 - DNA, 97 bp, homo sapiens
cggagttcatgcaaggtctccgtcacacacacacacacacacacacacacacacccacacacgcacgcacgcacggagttcatccaaggtctccgtc

SEQ ID NO: 9623 - DNA, 97 bp, homo sapiens
gattgacttccaagctcactcatgcggctgttggcaggatccagttcctcatctgtaggctcagctggggaaagatagacttccaagctcactcatg

SEQ ID NO: 9624 - DNA, 97 bp, homo sapiens
catgagtgagcttggaagtctatctttccccagctgagcctacagatgaggaactggatcctgccaacagccgcatgagtgagcttggaagtcaatc

SEQ ID NO: 9625 - DNA, 128 bp, homo sapiens
tcttctttttcctttccataggcagaggagcctctccatgttgccaccataagcactcaaacaatacaaagttcttcccactcttctttttcctttccataggcagaggagcctctccatgttgccac

SEQ ID NO: 9626 - DNA, 116 bp, homo sapiens
caaacattcaaacttattccttttaactacatgtctcgctggcattccaggtgccactgggtatgaaaacattcatacccagtgctatcaaacattcaaacttactccttttaact

SEQ ID NO: 9627 - DNA, 83 bp, homo sapiens
gggaaagtttgcaacttcctagagacttggagggctcagtaaacagaaagaagcgggaaagtttggaacttcctagagacttg

SEQ ID NO: 9628 - DNA, 103 bp, homo sapiens
ctgcctcagcctccagagtagctgggtttacaggcgccagccaccatgctcggctaatttttgttttagtgattctcctgcctcagcctcccgagtagctggg

SEQ ID NO: 9629 - DNA, 126 bp, homo sapiens
ggagtctgtctctgtcgcccaggctggagtgcagtggcgccatctcggctcactgcaagctccgcctcctggatttttttttttttagacggagtctgtctctgtcgcccaggctagagtgcagtg

SEQ ID NO: 9630 - DNA, 102 bp, homo sapiens
tgggcaacatagcaagatctcatctctacaaaacaacaacaacaaaaaacttgaggccaggagtttgagaccagcctgggcaacatagcaagatcccatctc

SEQ ID NO: 9631 - DNA, 89 bp, homo sapiens
ttaagttacttcccggttaaccattttgatagccgtgaatttcaggtgttagtcattctttaagttacttccctgttaaccattttgat

SEQ ID NO: 9632 - DNA, 122 bp, homo sapiens
tccaaggccccaccagagcagctagatacagagtgtcaattggtgtatttacaatccttgagctagacataaaggttctccaaggccccaccagagcagctagatacagagtgtcgattggt

SEQ ID NO: 9633 - DNA, 120 bp, homo sapiens
tcggatttagtggtccttaccgacgcattcttgaaaacctgcacccttgcctgtcctcctagaccacaaggaggaccgaccgagaaaaatcggatttagtggcccttaccgacgcattct

SEQ ID NO: 9634 - DNA, 106 bp, homo sapiens
gttttaatggagtccaccaagccctgggcttggaggatccagatgagacatttgggaggagtgaataaggtattcagttttaatggagtccactaagccctgggct

SEQ ID NO: 9635 - DNA, 80 bp, homo sapiens
ggagggaggtggggggcagcccccgcccggccagccgccccgtccgggagggaggtggggggcagcccccgcccggccag

SEQ ID NO: 9636 - DNA, 99 bp, homo sapiens
tacattgttaatttgtgatcattcttgtttcaatttgttttattcttgtttctctagtttcttgaggtgcaatgttacattgttaatttgtgatcattc

SEQ ID NO: 9637 - DNA, 92 bp, homo sapiens
agttggacacttcataccctctgggtatttaacctcttgtcttagtagttgtgacttggacacttggacacttggacacttcataccctctg

SEQ ID NO: 9638 - DNA, 87 bp, homo sapiens
tgctttttagctttataagggtgagaaaatagcaacaattagtgtagggattttcctgctttttagctttatgagggtgagaaaata

SEQ ID NO: 9639 - DNA, 141 bp, homo sapiens
aaactgtccttcctattcttttcaatgcatcatttctttttatttttcttttttaaaggagtcttgctctgcttggggatgggggggatgcaggtaatgcaaactgtccttcctattcttttcaatgcatcatttattttt

SEQ ID NO: 9640 - DNA, 78 bp, homo sapiens
taggaagtttcaaactttcccacaccttcctgtcttctgagccctccaggtcttaggaagttccaaactttcccacac

SEQ ID NO: 9641 - DNA, 97 bp, homo sapiens
agaatgtacactattgaggtttgttatggacatattcacgatgttatactatttggaatataaaattgagaatgtacacttttgaggtttgttatgg

SEQ ID NO: 9642 - DNA, 94 bp, homo sapiens
tgtcaggagttcgagaccagcttgggtaacatagtgagatcctcatctccaaataattatctaggtgttgtcaggagttcgagaccagcctggg

SEQ ID NO: 9643 - DNA, 98 bp, homo sapiens
caatcagaggctaaagtgaagttacaagggtcacaccctatgcaagcatctaattggttgtggacagcaaccaatcagaggctaaagtgaagttacaa

SEQ ID NO: 9644 - DNA, 97 bp, homo sapiens
tgggcatgccttcagtacttctaaaagtggtagagattctagccttttctgaagggctctgtattgtgtgttgggcatgccttcagtacttctgaaa

SEQ ID NO: 9645 - DNA, 77 bp, homo sapiens
gtttggaatttcctagagacttggagggctcagaagacaggaagatttgggaaagtttggaacttcctagagacttg

SEQ ID NO: 9646 - DNA, 94 bp, homo sapiens
taagattgtttccctatttttttctgataagctgttattatatagaaatgtaacagatatgagattttagataagattgtttccctatattttt

SEQ ID NO: 9647 - DNA, 98 bp, homo sapiens
ctgtgctttataagatgtttagagtatccctagctggataattctttgttgtggcaagcttccctgtgctttataagatgtttagggtatccctagct

SEQ ID NO: 9648 - DNA, 85 bp, homo sapiens
tttaaaaatgaaggaaagataaaacctgacacctaaaaataccatatctgggaaaattgtgttttaaaaatgaaggaaagataaa

SEQ ID NO: 9649 - DNA, 102 bp, homo sapiens
gagctataatataggccctcaggagctataatataatataggagctataatataatataatataatataataaacaggagctataatataggccctcaggag

SEQ ID NO: 9650 - DNA, 94 bp, homo sapiens
atcatgtgatagttctatttttgttttttgaggaacctctatgctgttttccatggcagctctagatcatgtggtagttctatttttgtttttt

SEQ ID NO: 9651 - DNA, 80 bp, homo sapiens
ttgctttcattcttcaggagatatttggatacagagtagtgccatttttgagactttgctttcatttttcaggagatatt

SEQ ID NO: 9652 - DNA, 125 bp, homo sapiens
cagtagtggaattgctgggtcaaaaggtagtttattttttgagaaatctctatactgttttccataggtgtcgaactagtttatgttttcaacagtagtggaattgctgggtgaaaaggtagttt

SEQ ID NO: 9653 - DNA, 132 bp, homo sapiens
gtgagtacctatacttgattatatatatatattatattatatataatatatataatttgttaatatattatttaaaaatatatttttaatggaagtgagtacctatacttgattttatatatatattatatt

SEQ ID NO: 9654 - DNA, 99 bp, homo sapiens
aaggtcccacaagaggctgtctgcaagcatatatatatatgagtttattaagtattaacttacatgatcacaaggtcccacaagtggctgtctgcaagc

SEQ ID NO: 9655 - DNA, 154 bp, homo sapiens
aattgaatcagtaataaatagcccaccaaccagaaaaagtccaggatgagttggatccacaggaagaaattgaatgcctgagcagaccaatgatgagttctgtaattgaatcagtaataaatagcccaccaaccagaaaaaagtccaggatgag

SEQ ID NO: 9656 - DNA, 100 bp, homo sapiens
aatgtttggaaaccatgcatctgacaaagaaataagaaataagaaatctgaataaagaaatctgaataagaaaatgtttggaaaccatgcatctgacaaa

SEQ ID NO: 9657 - DNA, 168 bp, homo sapiens
atgcaccattgtgctattggtcttcacttagaaaactttgaatataattcacagataaagttattaagaattccaaaatactgacagcagtgcacatttcctctgctcacacatatgcaccattgtgctattggtcttcacttacaaaactttgaatataattcacag

SEQ ID NO: 9658 - DNA, 93 bp, homo sapiens
gcaaaaaaggcttttgataaaattccacgtggtgcaaaaagttccacatgatgcaaaaataacatgacgcaagaaaggcttttgataaaattc

SEQ ID NO: 9659 - DNA, 108 bp, homo sapiens
cttccttatacaatagaataattgtatataaatatacaattattcttccttatacataaatcttccttatacaataatcttccttatacaatagaatatattgtatat

SEQ ID NO: 9660 - DNA, 100 bp, homo sapiens
ttacatcccagggataaatcccacttgatacaatacgtcacattgattgatgtgcacatggtgggccatccttacatcccagggataaatctcacttgat

SEQ ID NO: 9661 - DNA, 88 bp, homo sapiens
caagatggtggagaagctgatatcagtatatatatatatatatatatatatatgtctatcttcaagatggtggagaagctgatatcag

SEQ ID NO: 9662 - DNA, 86 bp, homo sapiens
aatcatatgttctgattgtcacttcccttagttcaacttcttacataaacagtgataatcatatgttctgattgtcaattccctta

SEQ ID NO: 9663 - DNA, 108 bp, homo sapiens
atttgataagaactaaaagagttagttattatataactaattatatctggtgatataatattatataatgaattatatttgataataactaaaagagttagttattat

SEQ ID NO: 9664 - DNA, 72 bp, homo sapiens
aatctcaagagggaacagaaaggccaacaaggcagcagagaacagaatctcaggagggaacagaaagggaat

SEQ ID NO: 9665 - DNA, 89 bp, homo sapiens
tttatgttccagttattgaaatattcttaatgtaggttattttatacttctattctcctttatgttccagttattgaaatattcttaat

SEQ ID NO: 9666 - DNA, 85 bp, homo sapiens
agcacacttataattaccaaactccgatatttacttgtaaaatgtcgcagtacaacagcgagcatacttataattaccaaactcc

SEQ ID NO: 9667 - DNA, 120 bp, homo sapiens
aacaatttttaatatatatgcacccaacactggagcacccagatgtataaagcaaacaatttttaatatataacataacaatttttaatatatatgcacccaacactggagcacccagat

SEQ ID NO: 9668 - DNA, 76 bp, homo sapiens
aaatattagagaatttctaatatttaatttaaatatttctaatatttaaattaaatattagagaatttctaatatt

SEQ ID NO: 9669 - DNA, 104 bp, homo sapiens
tgttttgtttaaattaatatttctaagtgcatacttaaaagtttttggtcttattgctaatttagtaaaataatgactgttttgtttaaattaatatttctaag

SEQ ID NO: 9670 - DNA, 77 bp, homo sapiens
gggaaagtttggaacttcctagagacttggagggctccaaagacaggaagatgtgggaaagtttggaacttcccaga

SEQ ID NO: 9671 - DNA, 119 bp, homo sapiens
agaaattgcctcttttcttctttctttctctttctttctttttctttcttcctttctcttcctcttcctttctttccctttctttcagaaattgcctcttttcttctttctttttcttt

SEQ ID NO: 9672 - DNA, 86 bp, homo sapiens
ccaaatttagcatcttaaaaattaacatctttttgttactttctctgtgtaagaaattatcccaaatttggcatcttaaaaattaa

SEQ ID NO: 9673 - DNA, 80 bp, homo sapiens
ctgtcttcttctgagccctccaagtctctaggaggttccaaactttctcacatttttctgtcttcttctgagccctccaa

SEQ ID NO: 9674 - DNA, 104 bp, homo sapiens
tttttaacccctgttcatttaatatattataaatatactattttttatattataaatatactttctattttttaacccctgttcatttaatatattataaatat

SEQ ID NO: 9675 - DNA, 100 bp, homo sapiens
caagctaagggattgaaacttcaaccaatcaaaggggactttcccctaagccaaaatgagtcacggctgcaagctaagggattaaaacttcaaccaatca

SEQ ID NO: 9676 - DNA, 117 bp, homo sapiens
ggccctagtaggaaataacttcaggccctagtaggaaataatttcagtaggaaaattcagtaggcctagtaggaaataacttacctggccctagtagtaaataatttcagtaggaaa

SEQ ID NO: 9677 - DNA, 98 bp, homo sapiens
atagcaaaaaaatgaaatcaatcattcacaatagcaaaaaaatcaatcattcacaatagcaaaaaatcattcacaatagcaaaaaaatgaaatcaatc

SEQ ID NO: 9678 - DNA, 89 bp, homo sapiens
tttcatagaataggaagtcagagagatattcaaaagcagagagctttctctaactttgtttcatagaataggaagtcagagagacattc

SEQ ID NO: 9679 - DNA, 98 bp, homo sapiens
gagttacagagaattccctccttcttgatcttttgaactttggtttcaatgtgacactggcttctgagaaagagttacagagaattctctccttcttg

SEQ ID NO: 9680 - DNA, 95 bp, homo sapiens
tttagaaagtgtaacaacagcaaatatatatgtatatatatgtgtgtatatatatatatatacctacatatatttaggaagtgtaacaacagcaa

SEQ ID NO: 9681 - DNA, 104 bp, homo sapiens
aaccacatgattatctcaatacatgcagaaatgtatgtacttctgcatgtattgacatgcagaaaatgacaaaaaccacatgattatctcaatacatgcagaaa

SEQ ID NO: 9682 - DNA, 125 bp, homo sapiens
gaacataaattgtgaagatttcatggacatttattagatccccaaattaatacttttgtaatttcttatgcctgtctttactgcaatctctgaacataaattgtgaagatttcatggacacttat

SEQ ID NO: 9683 - DNA, 313 bp, homo sapiens
tttgtaaatgcaccaatcagcactttgtgtctaactcaaggtttgtaaatgcaccaatcagcactttgtgtctagctcaagatttgtaaatgcacaaatcagcactgtgtctagctaaaggtttctaaacgcaccaatcagtgatctgtgactagctaatctagtggggacttggaaaacttttatgtctaactagaggattgtaaatgcaccaatcagcactctgtgtagctcagggattgtaaaggcaacaatcagcacccatcaaaatggaccaatcagctctcttctgtaaaatggaccaatcagctct

SEQ ID NO: 9684 - DNA, 105 bp, homo sapiens
taaagtaatataaaagccaacaaacaaaaagccaaatattggatgtggacaggcatttattaccctttaatattcttaaagtaatataaatgccaacaaacaaaa

SEQ ID NO: 9685 - DNA, 97 bp, homo sapiens
ctgagtttggcctaattttcctttctactcccaccactggtttatatgctgacaccatgggtgagtgccatctgagtttggcctagttttcctttct

SEQ ID NO: 9686 - DNA, 178 bp, homo sapiens
agaaaagaagaaaagaaaagagagaaagagagagaaaaaggaaggaaggaaagaaggaaggaaggaaggtaggaaggaaggaaggaaagaagggagaaagaaagaaaaagagagaaaaaagaaagaaaggaagaaaggaaggaaggaaagaaggaaggaaggaaggagggaagggaga

SEQ ID NO: 9687 - DNA, 80 bp, homo sapiens
ttaaatataattccagttttatgtattttttttttgctctatgttctgcttccacttaaatataagttccagttttatgt

SEQ ID NO: 9688 - DNA, 131 bp, homo sapiens
tgtactgttttattaattcatggaatagtgactaatagaagtattatttagccttatatataaaactcatagatataatactgttttgtgtactgttttattaattcatggaatagtgactaatggaagta

SEQ ID NO: 9689 - DNA, 87 bp, homo sapiens
gacttgccactaagggtgaaggagaaggggttgaggggtacttgcccctgccccaggaaagcgagacttgccaccaagggtgaagga

SEQ ID NO: 9690 - DNA, 88 bp, homo sapiens
gggtacttgcccctcccccagaaaagcagagaagagatagagacaaggagagaaggggttggggtacttgccccttccccagaaaagc

SEQ ID NO: 9691 - DNA, 106 bp, homo sapiens
tgattagtgatatggagcattttttccataccactggtatgagatggtatctcattttggttttgattttcattttctgatgattagtgatatggagcatttgttc

SEQ ID NO: 9692 - DNA, 163 bp, homo sapiens
gcttttctggggaaggggcaaatacccctcaaccccttctctccttgtctctaacccttctctgcttttctggggcaggggcaaatacccctcaaccccctctccttcacccttagcggcaagtcccactttcctggggcaggggcaagtacccctcaacccc

SEQ ID NO: 9693 - DNA, 105 bp, homo sapiens
tcatccttttgagggaataagcagggtgccagtttatggataattacacctcaaaaagagaaagttttaaaaaatcatccttttgagggtataagcagggtgcca

SEQ ID NO: 9694 - DNA, 127 bp, homo sapiens
tgataaatgtccatgaaatcttcacaatttatgttcagagattgcagtaaagacaggcataaaaaattataaaagtattaattttgggaactgataaatgtccatgaaatctttacaatttatgttc

SEQ ID NO: 9695 - DNA, 103 bp, homo sapiens
aaagtcattctatgaaaaagcaacgagtagatagataaattactatttattatttattacactttcgtataaagtcattatatgaaaaagcaacgagtagata

SEQ ID NO: 9696 - DNA, 91 bp, homo sapiens
gttcatgctaaagactatcagtgctctctatattattagaagttgggtccttagcatttctgtaaacagttcatgccaaagactatcagtg

SEQ ID NO: 9697 - DNA, 102 bp, homo sapiens
aaccaataaaaggcaaattaaaacagaatatatataaagaccaataaacatagactaacagattcataatttctaggaaccaataacaggcaaattaaaaca

SEQ ID NO: 9698 - DNA, 74 bp, homo sapiens; identical to SEQ ID NO: 6332

SEQ ID NO: 9699 - DNA, 129 bp, homo sapiens
attttttacctaattgaaatcattctgtacctagagttttttttacctaattgaattttttacctagttgaaatcattttttacctaattgaaacattaggtaaacatttttacctaattcaaataatt

SEQ ID NO: 9700 - DNA, 181 bp, homo sapiens
aaatgcaccaatcagtactctgtgtaaatgcaccaatcagcactctgtaaaaatgcaccaatcagtgctctgtgactagctaaaggactttaaatgaaccaatcagcactctgtaaaaatgcaccaatcagtgctctgggtctagctaaaggattgtaaacacaccaatcagcactctaaa

SEQ ID NO: 9701 - DNA, 79 bp, homo sapiens
aagtttggaacttcctagagacttggagggctcaaaggacaggaagatgtggaaaagtttggaacttcctggagacttg

SEQ ID NO: 9702 - DNA, 75 bp, homo sapiens
aatgtcatcagttaaggcaggaacaggccattttcctttcttttgtggtggaatgtcatcagttaaggcaggaac

SEQ ID NO: 9703 - DNA, 90 bp, homo sapiens
cagtgggtagctcctttctgcaggcaggttgtctcggtgagtgtccagttctcactggagagatctgcagtgggtagctcctttctacag

SEQ ID NO: 9704 - DNA, 125 bp, homo sapiens
gaacataaattgtgaagatttcatggacatttattagttccccaaattaatacttctatactttcttatgcctgtctttactgcaatctctgaacataaattgtgaagatttcatggacacttat

SEQ ID NO: 9705 - DNA, 163 bp, homo sapiens
attttacagagagctgattggtccattttatagagtgctgattggtccattttacagagtgctgattggtgtgtttacaaccctttagctagacacagagtgctgattggtgtgattttacagagtgctgattggtgtaattttacagagtgctgactggtgt

SEQ ID NO: 9706 - DNA, 311 bp, homo sapiens
aaatgcaccaatcagcactctgtatctagctaaaggattgtaaatgcaccaatcagcactctgtaaaaatgcaccaatcagcactctgtgtctggctaaaagattgtaaatgcaccaatcagcactcggtaaaaatgcaccaatcagcgatctgtgtctggctaaaggattgtaaaagcaccaatcagcactctgtaaaaatgcaccaatcagtgctctgtgtctagctaaaggattgtaaatgcaccaatcagcactctgtaaaaacacaccaatcagtgctctgtaaaatggaccaatcagcaggacgt

SEQ ID NO: 9707 - DNA, 101 bp, homo sapiens
acatacatcttgattgaatcagcccactgcgagcacggatcttgattgaatcagcctattggtgtagttttaggtctacatacatcttgattgaatcaacc

SEQ ID NO: 9708 - DNA, 137 bp, homo sapiens
ctccaaccagaaacattccaaccataagataaacccctccccaaccagagacatgccagccccaagtaacctcccctccaaccagagacattccaaccctgcaataaacttctccccaccacagtaacattccaagc

SEQ ID NO: 9709 - DNA, 84 bp, homo sapiens
aaaaataaaaaatccagtattctacacttgatcttaaccaaaaggccaagaagcgataaaaaaaaaaaaaaatccagtattcta

SEQ ID NO: 9710 - DNA, 112 bp, homo sapiens
accatttgacctagcaatcccatgactgggtgtatctatatctatctatatctatatccatatctgtatctcccatgagataccatttgacctagcaatcccatgactgggt

SEQ ID NO: 9711 - DNA, 94 bp, homo sapiens
aaaaagcagaactactaataagggtctaacaaagatcacattcttctgagggaaaaagacaaagggaaaaagcagaactactgataagggtcta

SEQ ID NO: 9712 - DNA, 108 bp, homo sapiens
gatcagtggccagtcatgtcacttctttcaaattctgtttgtgtcgctccacaaatcactatttaaataatagatgagcatcaggatcagtgaccagtcatgtcactt

SEQ ID NO: 9713 - DNA, 96 bp, homo sapiens
tgcagctctcagcagacaggaggccctagagtgggtggctcatctctgcaggcaggtcatcctgtcgtctctgcagctctcagcagagaggaggcc

SEQ ID NO: 9714 - DNA, 108 bp, homo sapiens
aagtgacatgactggtcactgatcctgatgctcatctattatttaaatagtgatttgtggagcgacacaaacagaatttgaaagaagtgacatgactggccactgatc

SEQ ID NO: 9715 - DNA, 78 bp, homo sapiens
aatgggtcttgggaaatgctagcacgttccacaggacactttgccaactatatgaatgggtcttgggaaatgctagca

SEQ ID NO: 9716 - DNA, 122 bp, homo sapiens
taaagacaggcataagaaattataaaagtattatttgggaactgataaatgtccatgaaatcttcacaatttatgttcagagactgcggtaaagacaggcataagaaattataaaagtatta

SEQ ID NO: 9717 - DNA, 92 bp, homo sapiens
atggatctgatgccttttgatggctgtttttttagctaccttatcagcataagcgttgtcctgagcgatgggatctgatgccttttgatggc

SEQ ID NO: 9718 - DNA, 107 bp, homo sapiens
acttctaaattcctcagataaggaattttgcctcagaatggcctgtttgatggttgccaggtgtttttggctttcttcgttacacttctaaattcctcagataagga

SEQ ID NO: 9719 - DNA, 61 bp, homo sapiens
aagcagatacacacacacacacacatatatacatatacacacacacacacacacacacaca

SEQ ID NO: 9720 - DNA, 119 bp, homo sapiens
taggtgacaatagtgatttcccctgtatgtctgcttaaggaatctatagatgccttgcttttagcatcccactaatcacgtaggtgacaatagtgatttcccctgtatgtctgcttaag

SEQ ID NO: 9721 - DNA, 105 bp, homo sapiens
atcagcagggtccagggaccgttgcgggttcttgggcaagaggtgtttctgctgctgcgtcagtgagtgcaactattctgatcagcagggtccagggactgttgc

SEQ ID NO: 9722 - DNA, 122 bp, homo sapiens
ttttacagagtgctgactggttcattttacagagtgccgattggtgcatttacaatattttagctagacacagagcactgattggtacatttttacagagtgctgattggtgcatttacaat

SEQ ID NO: 9723 - DNA, 109 bp, homo sapiens
tggcttcttgcttcctcctataaagacggaacccacaaatggggtacccagactaccaacatttctatccagctaactagaaatggcttcttacttcctcctataaaga

SEQ ID NO: 9724 - DNA, 112 bp, homo sapiens
tatctcaacctgttgctttattctttgcagtaggctggcgagagtatctgtgacaaatacctatatattcattcataccacacactatctcaacctgttgctttgttctttg

SEQ ID NO: 9725 - DNA, 99 bp, homo sapiens
ggtcatggtgtataattctttttatatgttgctggattcagtttgttagtatttatacactgctgggtcatggtgtataattctttttagatgttgctg

SEQ ID NO: 9726 - DNA, 94 bp, homo sapiens
tggccatttgagccctgaccacctcgggatccctgtccctcgcctgaacactggtttcctcccgagctatggctactggagccttggccatttg

SEQ ID NO: 9727 - DNA, 123 bp, homo sapiens
gttgtgctgagataagatcagctgtgttttggaaggagatgtgttttggaagtgcatctccgttgttcttagtgcatctccgttgtgctgagataagatcagttgtgttttggaaggagatgt

SEQ ID NO: 9728 - DNA, 93 bp, homo sapiens
agggtgctgtttcactgcctcaagacccaaatgacaaatctctctccacatctaaatcccaagagaagagggtgctgtttcactgcctgaaga

SEQ ID NO: 9729 - DNA, 102 bp, homo sapiens
tatggatatagataatattatcatagatatagacatagataaatagatatatatctatatacatagatgtatatatatctatagatatagataatattatca

SEQ ID NO: 9730 - DNA, 77 bp, homo sapiens
caaacctctagctagccacagagtgctgattggtgcttttttacagagcactgacaaacctctagctagctacagag

SEQ ID NO: 9731 - DNA, 110 bp, homo sapiens
gaagggagggaagagggcttgctatgttgcccaggctggtctaaggggaggggaggggaggggaggagaagggagggaaagagggcttgctatgttgcccaggctggtct

SEQ ID NO: 9732 - DNA, 92 bp, homo sapiens
ccattataaatcctgtcatatatatacatatatatgtatatatatggatggattatatatatataaatccattataaattctgtcatatata

SEQ ID NO: 9733 - DNA, 75 bp, homo sapiens; identical to SEQ ID NO: 302

SEQ ID NO: 9734 - DNA, 127 bp, homo sapiens
tgataaatgtccatgaaatcttcacaatttatgttcagagactgcagtaaagacaggcataagaaattataaaagtatcaattttgggaactgataaatgtccattaaatcttcacaatttatgttc

SEQ ID NO: 9735 - DNA, 93 bp, homo sapiens
cttcacccttagcggcaagtcccgcttttataaaggaaaggcaagaacccctcaaccccttctccttcacccttagcggcaagtcccgctttt

SEQ ID NO: 9736 - DNA, 148 bp, homo sapiens
aaggattattcaggccccctcccttccctaaacatcaagctcaaagatttgcccctgcccaaggctggcaaatttgctattctactacttctcaaggattattcaggccccctcccttccctacacatcaagctcaaagatttgcccc

SEQ ID NO: 9737 - DNA, 125 bp, homo sapiens
ataaatgtccatgaaatcttcacaatttatgttcaaagactgcagtaaagacaggcgtaagaaattattaaagtattaatctggggaactaataaatgtccatgaaatcttcacaatttatgttc

SEQ ID NO: 9738 - DNA, 97 bp, homo sapiens
tccttcacccttagcggcaagtcccacttttctgggggaggggcaaatatccctcaaccccttctccttcactcttagcggcaagtcccacttttct

SEQ ID NO: 9739 - DNA, 97 bp, homo sapiens
gccatccctagtgtctttacaaattatttacctcccaactttgacactgctttcattcaggatcagtggttcagtcatccctagtgtctttacaaat

SEQ ID NO: 9740 - DNA, 104 bp, homo sapiens
atcttatttaatcttcaaataactatttatttgaagttaataataaatagtaacttatttattatatcttatttaatcttatttaatcttcaaatatctattta

SEQ ID NO: 9741 - DNA, 86 bp, homo sapiens
aaccacagtaatagatttagtgactatatgaaaaccttttccaagtatttggattataaccacagtaatagatttagtgactatat

SEQ ID NO: 9742 - DNA, 92 bp, homo sapiens
gggagatcaatcccctgtcctcctgctacatttggtgccgtgacttggatcaggggacctccctcgggagatcaatcccctgtcttcctgct

SEQ ID NO: 9743 - DNA, 154 bp, homo sapiens
cactattcacaatagtaaagacatggaatcaacctaaatagtgatcaatgatagactggaatataaatcactgtaccataaagacacatgcactattcattgcagcactattcacaatagtaaagacatggaatcaacctaaatggtgatcaat

SEQ ID NO: 9744 - DNA, 112 bp, homo sapiens
agggtccagggaccgttgcaggttcttgggcaagaggtgtttctgctgttgcattggtgagagcaactattctgatcagcagggtccagggactgttgcaggttcttgggca

SEQ ID NO: 9745 - DNA, 105 bp, homo sapiens
gccatcaaaaggcattagatcccatcgctcaggacaacacttatgctgataaggtagctaaaaaagcagccatcaaaaggcatcagatcccatcgctcaggacaa

SEQ ID NO: 9746 - DNA, 85 bp, homo sapiens
tgctgcatcacacaaatagccatgaaagtgttcccagggggattatggttgtctctgctgcatcacacaaatagccatggaagtg

SEQ ID NO: 9747 - DNA, 75 bp, homo sapiens
aatgtcatcggttaaggcaggaacagagcattttcacttcttttgtggtggaatgtcatcagttaaggcaggaac

SEQ ID NO: 9748 - DNA, 94 bp, homo sapiens
aatagctagaaggaggatacttgaaatatatcctacaggataaccatagttaataatatatagtttcaaatagctagaaggaggatattgaaag

SEQ ID NO: 9749 - DNA, 95 bp, homo sapiens
cagttagtttatttaccatgtagttaaaacttgctgaattgaaatcgttctttttttattattcatcagttagtttatttactatgtagttaaaa

SEQ ID NO: 9750 - DNA, 255 bp, homo sapiens
atgcaccaatcagcactctgtgtctagctcagggattgtaaacgcaccaatcagcactctgtgtctagctaaaggtttgtaaacgcaccaatcagtgctctgtgtctagttaatctagtggggacttggagaacttttacgtctagctagaggattgtaaatacaccaatcagcattctgtgtctagctcagggattgtaaacgcaccaatcagcaccctgacaaaatggaccaatcagctctctgtaaaatgga

SEQ ID NO: 9751 - DNA, 80 bp, homo sapiens
aagtctctaggaagttccaaactttcccacatcttcctgtcttctgagccctccaagtctctaggaagttccaaattttc

SEQ ID NO: 9752 - DNA, 123 bp, homo sapiens
gaacataaattgtgaagatttcatggacatttatcaattcccaaaattaatacttttataatttcttacacctgtctttactgcaatctctgaacataaattgtgaagatttcatggacattt

SEQ ID NO: 9753 - DNA, 122 bp, homo sapiens
ccctgcccaagaacccgcaacggtccctggaccctgctgatcggagtagttgcgctcaccgacgcagcagcagaaacaacccctgcccaagaacccacaacggtccctggaccctgctgatc

SEQ ID NO: 9754 - DNA, 186 bp, homo sapiens
agctagatacagagtgtcgattggtgcattcacaaaccttgagctaaacacagggtgctgattggtgtgtttacaaaccttgagctagatacagagtgccgattggtgtatttacaatcccggagctagacataaaggttctccaaggccccaccagagcagctagatacagagtgtcggttggtg

SEQ ID NO: 9755 - DNA, 118 bp, homo sapiens
tcttaatggtgatcagcttccaagtattctttttttttttttttttggagacagagtctcgctctgtcccaggctggaccaagtattctcttaatggtgatcagcttccaagtattct

SEQ ID NO: 9756 - DNA, 85 bp, homo sapiens
ttttccccatattgtctcccctttatttttttatgtacctgtcatgagttcaatcccaaacttttccccatattgtctccctttc

SEQ ID NO: 9757 - DNA, 109 bp, homo sapiens
caccaatcggcactctgtatctagctgaaggtttgtaaacacaccaatcagcaccctgtgtttagctcaaggtttgtgagtgcaccaattgacactctgtatctagctg

SEQ ID NO: 9758 - DNA, 75 bp, homo sapiens
ccactagggcaatgcctagtggagctgtggaaagcaggatcctgcagagtctccactagggcagtgcctagtgga

SEQ ID NO: 9759 - DNA, 122 bp, homo sapiens
ttccagaacctgacaatccctaggagggggatagataggtgatataggatagaaagacaaataaaattctataaggtctgaactttccagaacctgacaatccctaggaggggtatagatag

SEQ ID NO: 9760 - DNA, 195 bp, homo sapiens
caccaatcggcactctgtatctagctcaaggtttgtggatacaccaatcagcaccctgtgtttagctcaaagtttgtgagtgcaccaatcgacactctgtatctagctgctctggtggggccttggagaacctgtgtgtcgaacctctgtatctaactaatctgatggggacctggagaacctttgtatctagct

SEQ ID NO: 9761 - DNA, 108 bp, homo sapiens
tatttatatttgttggatattcagcttgttgaagtaacaagagaaaattatttatatttgttaacaagagaaaattatttatatttgttggatattcagcttgctgaa

SEQ ID NO: 9762 - DNA, 91 bp, homo sapiens; identical to SEQ ID NO: 2576

SEQ ID NO: 9763 - DNA, 82 bp, homo sapiens
ggctgaagtgaagttacaaagttacacccaattagtattggttgcagcaaccaattaggggctgaagtgaagttgcaaagtt

SEQ ID NO: 9764 - DNA, 75 bp, homo sapiens
tgtatctagctactctggtggggacttggagaatctctgtgtccacactttgtatctagctaatctggtggggac

SEQ ID NO: 9765 - DNA, 185 bp, homo sapiens
agctagatacagagtgtcgattggtgcattcaaaaccttgagctaaacacagggtgctgattggtgtgtttacaaaccttgagctagatacagagtgccgattggtgtatttacaatccctgagctagacataaaggttctccaaggccccaccagagcagctagatacagagtgtcgattggtg

SEQ ID NO: 9766 - DNA, 93 bp, homo sapiens
ttgtatatatttcataatgtatatatgtatacattatgtatacatttcataatgtatatatgtatacaatatgtatacatttcataatgtata

SEQ ID NO: 9767 - DNA, 75 bp, homo sapiens
tctggtggggacttggagaacctttgtgtggacactctgtatctagctaatctggtggggacttggagaaccttt

SEQ ID NO: 9768 - DNA, 104 bp, homo sapiens
tccaggaagaatgaggtatgcgacaagtgaagagtgaacaagacaaagaggcgcctgagttcttgtcctgcatccaggaagaatgaggtatgcgaacaagtgaa

SEQ ID NO: 9769 - DNA, 104 bp, homo sapiens; identical to SEQ ID NO: 9768

SEQ ID NO: 9770 - DNA, 95 bp, homo sapiens
tgataatcaatgactaacaaactaatctggtatttgggacatatttgaatatctataaccctatcagatgtgataatcaatgactaacaaactaa

SEQ ID NO: 9771 - DNA, 97 bp, homo sapiens
aaaaaaccataaacatcagtttttaaattttttttattcctttttttttgtgtgccgggacatgttctcatctaaaaaaaccataaacatcagtttt

SEQ ID NO: 9772 - DNA, 104 bp, homo sapiens
tttaaacattaaacatttaaatgacattttaaaccactattttcttctagtgtttaaattaaatgtttaaacattaaacatttaaatgacattttaaaccacta

SEQ ID NO: 9773 - DNA, 108 bp, homo sapiens
tttaagagaataatttttaagagaataatttttgttcatatttcttaattattcatatttcttaattaaataactaatttaagagaataatttaagagaataattttt

SEQ ID NO: 9774 - DNA, 127 bp, homo sapiens
gaacataaattgtgaagatttcatggacatttatcagttccccaaattaatacctttataatttcttatgcctgtctttactgcaatctctgaacataaattgtgaagatttcatggacatttatca

SEQ ID NO: 9775 - DNA, 125 bp, homo sapiens; identical to SEQ ID NO: 2054

SEQ ID NO: 9776 - DNA, 145 bp, homo sapiens
agaacagcacggggaaaacctgcctccacgattcaattacctccccacaacatgtggagattatgaaaggtcttatgagacttactcattaccacgagaacagcacagggaaaacctgcctccacgattcaattacctccccaca

SEQ ID NO: 9777 - DNA, 74 bp, homo sapiens
cagtcctgatatctacctgtgagtctagcttaatatcggaagatgatgaatcagtcctgatatctacctgtgag

SEQ ID NO: 9778 - DNA, 75 bp, homo sapiens
cataatggaatccaaagagatgtggaaatgttaactcttacaccctctgtcataatgaaatccaaagagatgtgg

SEQ ID NO: 9779 - DNA, 110 bp, homo sapiens
actctggatatctctctctctgtgtgtgtgtgtctctgtctctgtctctctctctctctctctcacacacacacacacacacacacacactctctctctctctctctctc

SEQ ID NO: 9780 - DNA, 232 bp, homo sapiens
cccggcttagagtgtgtgtgtgtgtgtgtgtgtgtgtgtgtgtgtgtgtgtgtgtgttttagtaaagacagggtgtcaccgtgtgtgtgtgtgttttagtaaagacagggtttcaccatgttagccaggatggtcgcattctcgtgtgtgtgtgtgtgtgtgtgtgtgtgtgtgtgtgtgtgtgtgtgtgtgttttagtaaagacagggtttcaccgtgtgtgtgtgtgtgt

SEQ ID NO: 9781 - DNA, 78 bp, homo sapiens
ttccttgaaaatgctgttattcctttggaaacaaattttagaatcaccacacttccttgaaaatgctattattccttt

SEQ ID NO: 9782 - DNA, 163 bp, homo sapiens
aagtttggtgtttgcccttacttttttgacacatacaaaaatcaaacttttttaacacattgtaaatttatatatatactaatccttgatctgttgcaaggtatgttttctaagtttggtgtttgcccttactttttttgacacatacaaaaatcaaactttt

SEQ ID NO: 9783 - DNA, 89 bp, homo sapiens
aaactaagactaaaaggaaattttaagttaacttgtaattaaaaggaactttcaactttaattttaaaactaagactaaaaggaacttt

SEQ ID NO: 9784 - DNA, 126 bp, homo sapiens
ctgaatacataaataagtagtagtttcaatacttgaagcctagtagtttcaatacttcaagcctagcatgttgtaggtgctcaaatatattctgaatacataaataagaagtagtttcaatacttg

SEQ ID NO: 9785 - DNA, 73 bp, homo sapiens
ctctgtatctagctactctggtggggccttggagaacctttgtgtggaggctctgtatctagctaatctggtg

SEQ ID NO: 9786 - DNA, 85 bp, homo sapiens
aaatgcctgctctcactgcctggcctctccttgctcctggaacccactccacaggctcagaaatgcctgctcccactgcctggcc

SEQ ID NO: 9787 - DNA, 102 bp, homo sapiens
aatagttttatttataacattattacattatagctgcttttagcagagcaaattatatagcatcccactaatatcaaaaatagttttacttataacattatt

SEQ ID NO: 9788 - DNA, 132 bp, homo sapiens
tttttttcaaattatactcccagtcaaaccttttgtcacaatttgcgatgcattttcagttgcatcaaactaaaatgatttttatacttttttttcaaattatacttccagtcaaaccttttgtcacaattt

SEQ ID NO: 9789 - DNA, 168 bp, homo sapiens
tatctccttgtagttttaatttgcatttccatgatgattagtgatgttgagtatgcccacatctattattttttgattctataaattatggccattcttgcaggagtaaggtagtatctccttgtaattttaatttgcatttccatgatgattagtgatgttgagtat

SEQ ID NO: 9790 - DNA, 113 bp, homo sapiens
gcagggtccagggaccattgcgggttcttgggcaagaggtgtttctgctgctgcttcggtgagcgcatctattctgatcagcagggtccagggaccattgtgggttcttgggc

SEQ ID NO: 9791 - DNA, 76 bp, homo sapiens
tgtaatttgttttcaaaaactttcccacacacaaaaaaactttaggctcagtgtaatttgttttcaaaagctttcc

SEQ ID NO: 9792 - DNA, 110 bp, homo sapiens
atttcttatgcctgtctttaatctctgaacataaattgtgaagatttcatagatatttatcagttaccaaataatactcttattatttcttatgcctgtttttaatctct

SEQ ID NO: 9793 - DNA, 97 bp, homo sapiens
aaggctatagaacaccaagcaaatttaaacttcccaaatgtggaaaatatgttaaaatccaagtaaaataaggctatagaataccaagcaaatttaa

SEQ ID NO: 9794 - DNA, 109 bp, homo sapiens
gttagaagcactgccagtcccaaatgggagaggtccaaaagggatttaagctcaggctcatctcagctctagtaaatgttagaagcactgccagttccaaatgggagag

SEQ ID NO: 9795 - DNA, 107 bp, homo sapiens
tatatatatatgatgtgatatatatgtgtatatacatatgatggaatactacaataaactgtgctatgtgtgtgtgtgtgtatatatatatatgatggaatactaca

SEQ ID NO: 9796 - DNA, 84 bp, homo sapiens
atacaatacatatatacaatacaatacatatatactcaacaatatatatttcaatatatatttcaaatgtaatatacaatacat

SEQ ID NO: 9797 - DNA, 82 bp, homo sapiens
ctgtacccaatgtgtagtcttttatttctcacctccatcccaccctttcccccgagatgctgtacccaatgtgtagtttttt

SEQ ID NO: 9798 - DNA, 77 bp, homo sapiens
atgacctaatcatctcttacgggtaccatttcccaatactgttaacattggcaatgacctaatcatctcttacaggt

SEQ ID NO: 9799 - DNA, 76 bp, homo sapiens
ggatgaaagtgaactattttatttttatttttatttttttttttttgagacggagtgaaagtgaactattttattt

SEQ ID NO: 9800 - DNA, 95 bp, homo sapiens
tttttttgagacggagtctcactctgtcacccaggatccttaaattttttctttcttttctttttttgagacggagtctctctctgtcacccagg

SEQ ID NO: 9801 - DNA, 225 bp, homo sapiens
atactgtacctgacattatgcatatgtcatatgtataatactgtacatgacattatgcattatgcatatgtcatatgtatgatatgcatatattagcattatgcatatgtcatatttgtgatactgtacatgacattatgcattatgcatatgtcatgacatttagggcagtgaagctattccttatgatactgtacatgccattatgcatatgtcataaccggt

SEQ ID NO: 9802 - DNA, 99 bp, homo sapiens
ttggagaacagttcattcataagacagggtttggtagcaatgtacacttttctgtcttctatgtagaaacgaactcttggagaccagttcattcataag

SEQ ID NO: 9803 - DNA, 95 bp, homo sapiens
atcctgagatagggaggaactgcctgaaacagcaaaagccttgttccagtccttcctggagaatctaacatcttgagatagggaggaactgcctg

SEQ ID NO: 9804 - DNA, 125 bp, homo sapiens
ccaggcaattacactacagcatggtaagtgccatgtttgaagtattagagagctcccatcaggtaaaacaaaataaaacaaaaacaaaagccaggcaattacactacagcatggtgagtgccatg

SEQ ID NO: 9805 - DNA, 120 bp, homo sapiens
tacccatcaacataactttactagtccaggtaactcttgcacaggaaggaacaaatgcaaataactgttcatttcagaaacttctactgtacccatcaacataactttactagtccaggt

SEQ ID NO: 9806 - DNA, 100 bp, homo sapiens
ctcttcttctgatccagtgacttgggtaagactcattgtttcagacctctttttctgatcttgttcagaactcttcttctgatccagtgacttgggtaag

SEQ ID NO: 9807 - DNA, 79 bp, homo sapiens
agattttcaagataatgacagcataaaacgtgggaccccttgttcaaaaattattgagattttcaagataatgacagca

SEQ ID NO: 9808 - DNA, 89 bp, homo sapiens
tttattctttctaagtttgggttcccttatttatttatttatattataaagaatatatttattctttctaagtttgggttctcttattt

SEQ ID NO: 9809 - DNA, 126 bp, homo sapiens
tatatatctgtggaatagaatagatagttcagacataaaatcaaaaacaaaaatcaaaatagcgtggtattggcctaaggataaacatatatatctgtggaatagaatagatagttcagacataaa

SEQ ID NO: 9810 - DNA, 90 bp, homo sapiens
tcatgttacctaaattctcactagacttgatgaatcagacatcatgaacgaatgattcagctcatgttacctaaattctcactagacttg

SEQ ID NO: 9811 - DNA, 72 bp, homo sapiens
aggtctataccaggttgtgtccattcagaaaaaagagagagttatggctaggtctataccaggttgtgtcca

SEQ ID NO: 9812 - DNA, 79 bp, homo sapiens
cttcaccttccaccatgattgttatacgtattgtgatacgaagaagttatacgatcttcaccttccaccatgattgtaa

SEQ ID NO: 9813 - DNA, 61 bp, homo sapiens
agtatgcctctgtgtgtgtgtgtgtgtgtgtgcacgcgtgtgtgtgtgtgtgtgtgtgtgt

SEQ ID NO: 9814 - DNA, 94 bp, homo sapiens
tttcttctactaattttgggtttagtaattttgggcttgcttttattatttcttttcttctactaatcttgggtttagtaatcttgggcttgct

SEQ ID NO: 9815 - DNA, 186 bp, homo sapiens
agctagatacagagtgtcgattggtgcattcacaaaccctgagctagacacagggtgctgattggtgtgtttacaaaccttgagctagatacagagtgccgattggtgtatttacaatccctgagctagacataaacgttctccaaggccccaccagagcagctagatacagaatgtcgattggtg

SEQ ID NO: 9816 - DNA, 151 bp, homo sapiens
ggagcaatgcagtttatcatctcccacaggatctcaaagtatttgcaagctctgcaagcagagggtgggaggagggagaggatcaggaaaatattaatttggagcaatgcagtttatcatctcccacaggatctcaaagtatttgcaagct

SEQ ID NO: 9817 - DNA, 89 bp, homo sapiens
tttttcttttctttttctttcttttacaataaagaaaataaaagttttttttacaaaaaaaactttgtttttctttttctttcttttac

SEQ ID NO: 9818 - DNA, 215 bp, homo sapiens
cattccttccttcctttctttctttctttcttctttcttttctttctttctttctctttctttccctccccctccctccctccctctctctctctctctctctttctttctttctttctttctttctttctttctttctttctttctttttctttccttctttctttctttctttctctttctttctttctttctttctttctttctttctttct

SEQ ID NO: 9819 - DNA, 315 bp, homo sapiens
agctagatacagagtttcaacacacaggttctccaaggccccaccagagtagctagatacagagtgtcgattggtgcattcacaaacgcagagctagacacagggtgctgattggtgtgtttacaaaccttgagctagatacagagtgccgattgttgtgtttacaatccctgagctagacataaaggttctccaaggccccaccagagtagctagatacagagtgtccattggtgcattcacaaaccctgagctagacacagggtgctgattggtgtggttacaaatcttgagctagatacagagtgcccattg

SEQ ID NO: 9820 - DNA, 375 bp, homo sapiens
cagagggaggcgatgtggtcagaggtgaaggagagagagcaaggagcctgatcaggaatgagggggcgtggtcaggagtgagggggcatggccagtgtgcggtgagtgagggggcgtggtcaggggtatcaagagcgaggggtgtggtcaatgatgaaggagtgaggtggtgtggtcagggatgaggagagtgagggggtgtggtcaggaatgaggcgagaatgaggcatagtcaagaatgagagtgagggggagtggtcaggagtgatgaaagatgggggtgtggtcaggggtgaggagagtgagggggtgtggtcaggaatgaggcgagaatgaggcatagtcaagaatgagagtgacggggagtggtcagga

SEQ ID NO: 9821 - DNA, 89 bp, homo sapiens; identical to SEQ ID NO: 9817

SEQ ID NO: 9822 - DNA, 156 bp, homo sapiens
atacataaatatatatttaaaatatacagaggttgaatatttatcatatatatgggagtgtccatacacacactcccatatatatgataaatattcgaccttcatatatagatagatacacacacacaaacactcccatatatatgataaatattc

SEQ ID NO: 9823 - DNA, 95 bp, homo sapiens
gaagatgtattgaattttaccaaatactttttcatgcttagtttgttgagtgtttttatcacgaagatgtattgaattttaccaaatactttttc

SEQ ID NO: 9824 - DNA, 89 bp, homo sapiens
ataagggtctaacaaagatcacatgcttctgagggaacaggacaaagggaaaaagcagaaccactgataagggtccaacaaagatcaca

SEQ ID NO: 9825 - DNA, 76 bp, homo sapiens
agtttggaacttcctagacacttgaagggctcagaagacaggaagatgtgggagtttggaacttcctagagacttg

SEQ ID NO: 9826 - DNA, 91 bp, homo sapiens
ccaagtttgtaaacagggaaactcttagcaccctggttgatgtgtcaagaagagatttatgggaccaagtttgtaaacagggaaactctta

SEQ ID NO: 9827 - DNA, 100 bp, homo sapiens
aaacttatgggggcaaaccctaggtgactttgggtttggtgatgacttttttagatgtaacaccaaaatttggttaaacttatgggtgcaaaccctaggt

SEQ ID NO: 9828 - DNA, 132 bp, homo sapiens
tctccactttcctggggggcaaacacctcccaccccttctccactttcctggggggcaagcatccccaaccccttctctccatgtctctactctctcttttctctccactttcctggggggcaagcaccccc

SEQ ID NO: 9829 - DNA, 83 bp, homo sapiens
atgtgggaaagtttggaacttcctagagagttggagggctcagaagacaggaagatgtgggaaagcttggaacttcctagaga

SEQ ID NO: 9830 - DNA, 75 bp, homo sapiens
accagattagctagatacagagtgtggacacaaaggttctccaaggccccaccagagtagctagatacagagtgt

SEQ ID NO: 9831 - DNA, 129 bp, homo sapiens
acaacaggccccggtgtgtgatgttccccttcctgtgtctatgtgttctcattgttcaattcccacctacaggccccggttcaattccccacaacaggccctggtgtgtgatgttccccttcctgtgtc

SEQ ID NO: 9832 - DNA, 109 bp, homo sapiens
acaaataaatgtcgcaagtgaccaggatcctgaaatacagagccacaaaatacaaaaccacccatgccttgacaaataaatgtcacaagtgaccaggatcctgaaatac

SEQ ID NO: 9833 - DNA, 186 bp, homo sapiens
agctagatacagggtgtcgattggtgcattcacaaaccctgagctagacacagggtgctgattggtgtgtttacaaaccttgagctagatacagagtgccgattggtgtatttacaatccctgagctagacataaaggttctccacatccccaccagagcagctagatacagagtgtcgattggtg

SEQ ID NO: 9834 - DNA, 78 bp, homo sapiens
attgtgtggtcagtcttacaatatgtcagtcttgactcttacaatatgtccaattgtgtggtcaatcttacaatatgt

SEQ ID NO: 9835 - DNA, 137 bp, homo sapiens
tttagggtacatgtgcacaatgtgcaggttagttacatatgtttttgttgttttttttcctcttttattattattattattattatactttaagttttagggtacatgtgcacaatgtgcaggttagttacatatgt

SEQ ID NO: 9836 - DNA, 247 bp, homo sapiens
agctagacacagagcactgattggtgcatttacaatcaccacaaaagtccccactagatgagctagacacagagcactgatttgtgcgtttacaaaccttgagctagacacagggtgctgattggtgtgtttacaaaccttgagctagacacagagtgctgattggtgcatttacaatccttcagctagacataaaagttctccaagtccccactagattagctagacacagagcactgattgatgt

SEQ ID NO: 9837 - DNA, 82 bp, homo sapiens
cttggcccaggaccaattaggagctgaagtaatgattcataggggctactcagcttggcccagtacctatcaggagctgaag

SEQ ID NO: 9838 - DNA, 98 bp, homo sapiens
cacattctgttattacttacacattagtgttattactaacacatacttaaaataagtaacacattctatgtaacacattatgttattacttacacatt

SEQ ID NO: 9839 - DNA, 83 bp, homo sapiens
tttatgaaaatagtgttaaatttttataagggtaaaataatattttcataaataagactttatgaaaatagtgttaaattctt

SEQ ID NO: 9840 - DNA, 91 bp, homo sapiens
cacatttggatgtgcctttatagtagccattttttatggctgcatagtattccatggtgcatatgtgccacatgtggatgtgcctttatag

SEQ ID NO: 9841 - DNA, 82 bp, homo sapiens
tctctagaagttccaaactttcccacatcttcctgtcttctgagacctccaagtctctaggaagttccaaactttcccacat

SEQ ID NO: 9842 - DNA, 98 bp, homo sapiens
ttaggtaattttaattattattattttgttattattaatgatttatcaagccattttatactaggggatatttaggtaattttaataattattatttt

SEQ ID NO: 9843 - DNA, 103 bp, homo sapiens
cttcttccttcgacactactgtataagatactgatgtttctgtttatattaaaaatattcataaaagtcaatgcttcttccttcaacactactgtataagata

SEQ ID NO: 9844 - DNA, 88 bp, homo sapiens
ctttatacatctaggttccagtatcctataaagcacctataaagtgctttatagatcagtgctttatacatctaggttccagcatcct

SEQ ID NO: 9845 - DNA, 76 bp, homo sapiens
catcatctagatactgcaggtttaataaaacaaataaagaggggcacaatcacatcatctagatactgcaggttat

SEQ ID NO: 9846 - DNA, 94 bp, homo sapiens
tcttctcttccttccttctttctttccttcctgtcttcattaataaaagtgattttctctggtgacataataatttctttctgttttatttttt

SEQ ID NO: 9847 - DNA, 125 bp, homo sapiens
gaacataaattgtgaagatttcatggacatttattagttctccaaattaataatattataatttcttacgcctgtctttactgaaatctctgaacataaattgtgaagatttcatggacacttat

SEQ ID NO: 9848 - DNA, 181 bp, homo sapiens
agctcctagcagagaggagaccctggaataggaagctcctctcctcaagcagatcatcccattatcttcccagctctcagcagagaggaggccctggagtgatttgatcctctctgcagctggtagtcctgacatctctgcaggcctctgaagctctcagcagagaggaggccctagagtg

SEQ ID NO: 9849 - DNA, 73 bp, homo sapiens
gagacagaagtttagagctagaagtttagagctagtattttcatactgtggagatagaagtttagagctagaa

SEQ ID NO: 9850 - DNA, 94 bp, homo sapiens
caggtgagagatggtgacagtgaattagtgagaagttgtatgtttctggatatatttttgaggcacaatcagggtgagagatggtgacagtgaa

SEQ ID NO: 9851 - DNA, 86 bp, homo sapiens
atgtgggaaagtttggaacttcctagatactcgggatggggggttcagaagacaggaagatgtgggaaagtttggaacttcctaga

SEQ ID NO: 9852 - DNA, 125 bp, homo sapiens
gaacataaattgtgaagatttcatggacatttattagtttcccaaattaatacttttatagtttcttatgcctgcctttactgcagtctctgaacataaattgtgaagatttcatggacacttat

SEQ ID NO: 9853 - DNA, 83 bp, homo sapiens
attttgtgtagctattgcttttttctcaccctaggacaggacacgtgggccccattgcattttgtgtagctattgcttttttc

SEQ ID NO: 9854 - DNA, 83 bp, homo sapiens
cttgttttcttcttccgaatatttggtaactaaataacagttattagaacctgttttcttgttttcttcttccaaatatttgg

SEQ ID NO: 9855 - DNA, 148 bp, homo sapiens
taacaactgaaaaatatagttatactaaaaaagatgttagaagttaactattgtgtttcttatgttagatttatgtaacaactgaaatatatagttatatttcagttatatatatataactatttaacaactgaaaaatatactaaaa

SEQ ID NO: 9856 - DNA, 108 bp, homo sapiens
agctagatacagagtgtcgattggtgtatttgcaaaccttgagctagacacagagtgctgattggtgcatttacaaaccttgagctagatacagagtgccgattggtg

SEQ ID NO: 9857 - DNA, 80 bp, homo sapiens
atgtgggaaagtttggaacttcctagagacctggagggctcagaagacaggaagatgtgggaaagtttggaacttcctag

SEQ ID NO: 9858 - DNA, 77 bp, homo sapiens
tttcccacatcttcctgtcttctgagcccaccaagtctctagaaagttccaaactttcccacattttcctgtcttct

SEQ ID NO: 9859 - DNA, 79 bp, homo sapiens
gtcaatcccattactgggtatataaaaaactacaaataaaactaccacataatccagcaatcccattactgggtatata

SEQ ID NO: 9860 - DNA, 77 bp, homo sapiens
agagagatcactggttctttgaaggccttcgtccgggctagcttcaggaagtagagagattactggttctttgaagg

SEQ ID NO: 9861 - DNA, 90 bp, homo sapiens
catttacaatcctctagctagacacagaaaactggtgcgtttttacagactgctgattggtgcatttacaatcctttagctagacacaga

SEQ ID NO: 9862 - DNA, 125 bp, homo sapiens
gtgtgggtggtgcccgtctcgtgggtctcgcatggcgggttggagcacaccctctgggcgctgcctgcattcgaggtagtggcggtgttggtggtgcctgtctcgtgggtctcacatggtgggtt

SEQ ID NO: 9863 - DNA, 308 bp, homo sapiens
gtcatggtggtgctggtcgcgctggtctggcgggtttggcactgggacttagagccctgggctgcctccagcgccccagtggccacactgatccggatcacggcaggggtgccagctgcacaggcccgacgggcatctcgctggtggttggcgccgacgctcgacatggctgtagtggcagtgttggtggtgcccgtctcgtgggtctcgcagggtgggtttgagcagccatgctgcccggccatgttggaggtggcggtggtggcggtgttggtggtgcccgtctcgtgggtctcgcagggcgggtt

SEQ ID NO: 9864 - DNA, 150 bp, homo sapiens
ccgctcgctcccaccgcgagaccttctgctccgcgcccgcgcgggcccctccccctccatcgctagccaatccccgttttgtgacgtatgggctcgcggccccgctcgctcccaccgcgagaccttttgctccgcgcccgcgcgggcccc

SEQ ID NO: 9865 - DNA, 85 bp, homo sapiens
attttcctgtcttcttctgagccctccaggtctctaggaagttccaaacattgccacattttcctgtcttcttctgagccctcca

SEQ ID NO: 9866 - DNA, 125 bp, homo sapiens
ataaatgtccatgaaatcttcacaatttatgttcagagatcgcagtaaagacaggcgtaagaaattataaaagtattaatttggggaactaataaatgtccacgaaatcttcacaatttatgttc

SEQ ID NO: 9867 - DNA, 82 bp, homo sapiens
atcagaagaatattaaaaatatatttttatatttataatggtgttgggaaatctagatatcagaagaatattaaaaatatat

SEQ ID NO: 9868 - DNA, 91 bp, homo sapiens
ttcaaaaaattagaaatgagagaaatatcactcagaggcttgagtctaagtcactagaagtatgaaatttgaaaaaattagaaatgagaga

SEQ ID NO: 9869 - DNA, 303 bp, homo sapiens; identical to SEQ ID NO: 9451

SEQ ID NO: 9870 - DNA, 388 bp, homo sapiens; identical to SEQ ID NO: 9452

SEQ ID NO: 9871 - DNA, 314 bp, homo sapiens
tttgtaaatgcaccaatcagcactttgtgtctaactcaaggtttgtaaatgcaccaatcagcactttgtgtctagctcaagatttgtaaatgcacaaatcagcactgtgtctagctacaggtttctaaacgcaccaatcagtgctctgtgactagctaatctagtggggacttggaaaacttttatgtctagctagagggttgtaaatgcaccaatcagcactctgtgtagctcagggattgtaaacacaacaatcagcaccctatcaaaatggaccaatcagctctcctctgtaaaatggaccaatcagctct

SEQ ID NO: 9872 - DNA, 231 bp, homo sapiens
acctaagtgatgtgactcttcttcatattctagactgtgccaatcaaggggattattgcatattgcagagcacagcacctatgtggagtgactcccctttttcttctttcctgtctacgttgggcttgggaacatattatttgaggctatacccaggtgatgtgactcttctgaataggcacagcctactaaggagattatactcagcacccaggtgatgtgactctcctg

SEQ ID NO: 9873 - DNA, 111 bp, homo sapiens; identical to SEQ ID NO: 9454

SEQ ID NO: 9874 - DNA, 97 bp, homo sapiens; identical to SEQ ID NO: 9455

SEQ ID NO: 9875 - DNA, 99 bp, homo sapiens; identical to SEQ ID NO: 9456

SEQ ID NO: 9876 - DNA, 117 bp, homo sapiens; identical to SEQ ID NO: 9457

SEQ ID NO: 9877 - DNA, 197 bp, homo sapiens; identical to SEQ ID NO: 9458

SEQ ID NO: 9878 - DNA, 175 bp, homo sapiens; identical to SEQ ID NO: 9459

SEQ ID NO: 9879 - DNA, 267 bp, homo sapiens; identical to SEQ ID NO: 9460

SEQ ID NO: 9880 - DNA, 136 bp, homo sapiens; identical to SEQ ID NO: 9461

SEQ ID NO: 9881 - DNA, 103 bp, homo sapiens; identical to SEQ ID NO: 9462

SEQ ID NO: 9882 - DNA, 96 bp, homo sapiens; identical to SEQ ID NO: 9463

SEQ ID NO: 9883 - DNA, 110 bp, homo sapiens; identical to SEQ ID NO: 9464

SEQ ID NO: 9884 - DNA, 76 bp, homo sapiens; identical to SEQ ID NO: 9465

SEQ ID NO: 9885 - DNA, 123 bp, homo sapiens; identical to SEQ ID NO: 9466

SEQ ID NO: 9886 - DNA, 95 bp, homo sapiens; identical to SEQ ID NO: 9467

SEQ ID NO: 9887 - DNA, 123 bp, homo sapiens; identical to SEQ ID NO: 9468

SEQ ID NO: 9888 - DNA, 103 bp, homo sapiens; identical to SEQ ID NO: 9469

SEQ ID NO: 9889 - DNA, 135 bp, homo sapiens; identical to SEQ ID NO: 9470

SEQ ID NO: 9890 - DNA, 81 bp, homo sapiens; identical to SEQ ID NO: 9471

SEQ ID NO: 9891 - DNA, 85 bp, homo sapiens; identical to SEQ ID NO: 9472

SEQ ID NO: 9892 - DNA, 102 bp, homo sapiens; identical to SEQ ID NO: 9473

SEQ ID NO: 9893 - DNA, 79 bp, homo sapiens
agggagacaattttgctaagtggtttgtcttcaagttgtgctttccacataacccagggagacagttttgctaagtggt

SEQ ID NO: 9894 - DNA, 104 bp, homo sapiens
aaccacatgattatctcaatacatgcagaaatgtatgtatttctgcatgtattgacatgcagaaaatgacaaaaaccacatgattatctaaatacatgcagaaa

SEQ ID NO: 9895 - DNA, 108 bp, homo sapiens
agctagatacagagtgtcgattggtgcactcacaaaccttgagctaaacacagggtgctgattggtgtgtttacaaaccttgagctagatacagagtgccgattggtg

SEQ ID NO: 9896 - DNA, 105 bp, homo sapiens; identical to SEQ ID NO: 9684

SEQ ID NO: 9897 - DNA, 97 bp, homo sapiens
ctgagtttggcctaattttcctttctactcccaccactagtttatatgctgacaccatgggtgagtgccatctgagtttggcctagttttcctttct

SEQ ID NO: 9898 - DNA, 131 bp, homo sapiens
tgtactgttttattaattcatggaatagtgactaatagaagtattatttagccttatatataaaactcatagatataatactgttttgtgtactgttttattaattcatggaatagtgactaatagaagta

SEQ ID NO: 9899 - DNA, 112 bp, homo sapiens
caaacaaccccatcaaaaagtggacaaaggatatgaatctgcaaggaactcacacatatttacaagaaaaaaaaacaaacaaccccatcaaaaagtggacaaaagatatgaa

SEQ ID NO: 9900 - DNA, 105 bp, homo sapiens
tgattagtgatatggagcattttttgcaacccactggtatgagatggtatctcattttggttttgattttcattttctgatgattagtgatatggagcatttgtt

SEQ ID NO: 9901 - DNA, 96 bp, homo sapiens
tacccctcaaccccctctccttcacccttagcggcaagccctgctttcctggggcaggggcaagtacccctcaaccccttctccttcacccttagc

SEQ ID NO: 9902 - DNA, 118 bp, homo sapiens
atcagcagggtccagggaccattgcaggttcttgggcaagaggtgtttctgctgctgcatcagtgagcacaactattctgatcagcagggtccagggaccattgcagtttcttgggca

SEQ ID NO: 9903 - DNA, 91 bp, homo sapiens
tttctttatttgattaaagctaggctgtttctttaagctatttcttcatagtttttcaggacagttttctttatttaattaaagctaggct

SEQ ID NO: 9904 - DNA, 100 bp, homo sapiens
tccctcctatggaccactgaggaacaagtggtccatagcactaatgaggtcctctggacctccatagcactgtccctcctatggaccactgaggaacaag

SEQ ID NO: 9905 - DNA, 78 bp, homo sapiens
cattgtgtatatgcaaattatgttcaaatgtccattatgtccatatttgtcattgcattgtgtatatgcaaattatgt

SEQ ID NO: 9906 - DNA, 119 bp, homo sapiens
atatatccaaagaatatgttgcaaactaataggagggagagagagagagggagagagagagagagagagatgaatggggaggatacaggatatatccaaagaatgtgttgcaaactaat

SEQ ID NO: 9907 - DNA, 118 bp, homo sapiens
ctgtggtaatgatccactgttcatttagtatggagccagcacagaaatgggagaaagacagttgaaactggcacatctagctgtggtaaggatccactgttcatttagtatggagcca

SEQ ID NO: 9908 - DNA, 75 bp, homo sapiens
gcaggtggagatttcaccagtgctacagaaaaaagagtaggtcctgataggcaggtggagctttcaccagtgcta

SEQ ID NO: 9909 - DNA, 104 bp, homo sapiens
tgattggtgcatttacaatcctttagctagacacagagtgctgattggtgcgattttacagagtgttgattggtgcatttacaatcctttatctagacacagag

SEQ ID NO: 9910 - DNA, 83 bp, homo sapiens
tatgagtattgaaagtaaaaagaatatcaaatggatagtttaacataaaataaagtaaatatgagtattgaaagtaaaaataa

SEQ ID NO: 9911 - DNA, 83 bp, homo sapiens
atgtgagtcaaatctttctatgagtttttgtatatgtgagtatatgagttttggtatatgtgagtcaactctttctatgagtt

SEQ ID NO: 9912 - DNA, 73 bp, homo sapiens
tatgtcacaatttcttaagtgggaaggatccagacaggagagtagagtcatatgtcacaatttcttaaatggg

SEQ ID NO: 9913 - DNA, 73 bp, homo sapiens
accaagtagatgagccgcataacccaggagagagtaccagagatatgtcaccaagtagaagagccgcataacc

SEQ ID NO: 9914 - DNA, 77 bp, homo sapiens
tgggtgacagaattatacctgagacactagaattgggtgcccacaaatgatgtgggtgacagaattatacccgagac

SEQ ID NO: 9915 - DNA, 124 bp, homo sapiens
aacataaattgtgaagatttcatggacatttattagatccccaaattaatacttttataatttcttacacctgtctttactgcaatctctgaacataaattgtgaagatttcatggacacttat

SEQ ID NO: 9916 - DNA, 92 bp, homo sapiens
tagcaataacagttaaaacagaaaattagaagtaagtaacattaacaagaacagcaatgataacctcaatagcaataacaattaaaacagaa

SEQ ID NO: 9917 - DNA, 109 bp, homo sapiens
gtcacttattaacctatattgacatttgttctttatctataaagcagagggtttgaagtgtgtgcaggttgtgctgttatgtagtcacttattaacctatattggcatt

SEQ ID NO: 9918 - DNA, 72 bp, homo sapiens
aatgctagacactttcacaattttacccattttaatgcctccagtctcaaatgctagacactttcacagttt

SEQ ID NO: 9919 - DNA, 118 bp, homo sapiens
tgcccaagaaactgcaatggtccctggaccctgctgatcagaatagttgtgctcactgatgcagcagcagaaacacctcttgcccaagaacctgcaatggtccctggaccctgctgat

SEQ ID NO: 9920 - DNA, 181 bp, homo sapiens
tgtaccaatcagtgctctgtagctagcaaggggattgtaaaattcacaaatcagggctctgtaaaaatacaccaatcagcactctgtaactagcattagtattgtaaattgcaccaataagcactctgtaaaatgcacctattagtgctctgtaaaacacactaatcagtgctctgtaaaa

SEQ ID NO: 9921 - DNA, 94 bp, homo sapiens
ctcaatcataagataggttcaaccctgtgagatgaatgcacacatcaaagggagtttctcagaatgcttctctcaatcaaaagataggttcaac

SEQ ID NO: 9922 - DNA, 108 bp, homo sapiens
aataactcttagatctgtctttgtgaggctcttttctagatcctcccctgcctctttccctacatcttctttaaaacaaataactcttagatctgtctttgtgaggct

SEQ ID NO: 9923 - DNA, 84 bp, homo sapiens
ccttctcccctgaagctggtcataaaacctaggaaggtcattgtctgacattttcccacccttctcccctgaagcaggtcataa

SEQ ID NO: 9924 - DNA, 113 bp, homo sapiens
acatcctgctgattggttcattttacagagtgctgattggtccattttagagagttctgattgatgaatttacaatcctttaggaagacacagagtgctgattggtgcatttt

SEQ ID NO: 9925 - DNA, 75 bp, homo sapiens
acaaaagaagtgaaaatggcctgtttgtgccttaactgatggcattccaccacaaaagaagtgaaaatggccagt

SEQ ID NO: 9926 - DNA, 100 bp, homo sapiens
cttgttcctcagtggtccataggagggacagtgctatggaggtccataggacctcattagtgctatggaccacttgttcctcagtggtccataggaggga

SEQ ID NO: 9927 - DNA, 73 bp, homo sapiens
aaataatctagccaagtatataatacaagtatttaatatacttgtgtacaaataatctggccaagtatataat

SEQ ID NO: 9928 - DNA, 89 bp, homo sapiens
agaaaatattttccagaatatgaggaggggatatagctcagggttagagcatcagactgcggaccaagaaaatattttccagaatatga

SEQ ID NO: 9929 - DNA, 130 bp, homo sapiens
tggaaagatgaatgcactgaatgaaataaataaggttataacatttactccaaatttttctcatagattgttgcaaatttcctcttttaatggaaagatgaatgcactgaatgaaataaataaggttata

SEQ ID NO: 9930 - DNA, 92 bp, homo sapiens
tgtgtttacagtcctttagctagacaaagagtgctgattggtatgattttacagagtgctgattgttgtgtttacaatcctttagctagaca

SEQ ID NO: 9931 - DNA, 85 bp, homo sapiens
taggggccaccctacaaagtcagacaccccacaaagtcagaaaatccatgtgtaacttttgtaggggacaccctacaaagtcaga

SEQ ID NO: 9932 - DNA, 90 bp, homo sapiens
tgatatttgtgatttttaaaagttaaattttataactgtgtatctatattacacttttatatctgtggtatttgtgatttttaaaagtta

SEQ ID NO: 9933 - DNA, 114 bp, homo sapiens
aaacaacctcaacataataaaagccatatatgaaaagcagactaggaaaacaggaaactatgaaacatagggaaacaacctcaacataataaaagccatatatgaaaagcagac

SEQ ID NO: 9934 - DNA, 116 bp, homo sapiens
tccagcttcagttttctgcatatggctagccagttttccttcttgagttaatttttgtataaggcataaggaaggggtccagcttcagttttctgcatatggctagccagttttcc

SEQ ID NO: 9935 - DNA, 107 bp, homo sapiens
atagctgcaaactaagggattgaaacttcaaccaatcaaagaggactttcccctaagccaaaatgagtaatagctgcaaactaagggattgaaacatcaaccaatca

SEQ ID NO: 9936 - DNA, 93 bp, homo sapiens
tctaatatgggaacctaaaacacaaaaactcagctagaactcactctctaacagcagctagaactcactttctaacatgggaacctaaaacac

SEQ ID NO: 9937 - DNA, 78 bp, homo sapiens
attattaagcagtatattaaccatatattattcattattattaagcagtatacattattaagcagtatactaaccata

SEQ ID NO: 9938 - DNA, 105 bp, homo sapiens
tgattggttgaagtttcaatcccttagcttgcagctatgactcattttggcgtacaggaaagtctcctttgattggttgaagtttcaataccttagcttgcagct

SEQ ID NO: 9939 - DNA, 75 bp, homo sapiens
gtggggacatggagaacttttgtgttgacactctgtatctagctaatctagtggggacatggagaacttttgtgt

SEQ ID NO: 9940 - DNA, 102 bp, homo sapiens
tgtttctgctgctgcgtcggtgagtgcaactattccaatcagcatggtcagggaccgttgcagattcttgggcaggggttgtttctgctgctgcatcggtga

SEQ ID NO: 9941 - DNA, 414 bp, homo sapiens
caccaatcagcactctgtatctagctcaaggtttgtaaacatatcaatcagcaccctgtgtctagctcagggtttgtgaatgcaccaatcggcactctgtatctagttagtctggtggggacttgaagaatctttatgtctagctaaaggatagaaaatgcatcaatccacactctgtatctagctcaagttttgtaaatgcaccaatcagcactctgtgtctagctcagggtttgtaaatacaccaattgacactatgtatctagctaatctagtggagacatgggaaattgttgtctagctcagagactgtaaatacacaatcagcaccctgtcaaaatggaccagtcagctctctgtaaaacagaccaatcaactccctgtaaaatggaccaatcagcatgatgtgggtgg

SEQ ID NO: 9942 - DNA, 96 bp, homo sapiens
ttgcagctatgactcattgtggcttagaggaaagtcccctttaattggttagagtttcaatcccttagcttgcagctatgactcattttggcttag

SEQ ID NO: 9943 - DNA, 148 bp, homo sapiens
gattaaaaacatcaggctgcagctagagcttaaattactaatatgattggttgatgtttcaatcccttagtttgcagctgtgactcatttcggcttaggagaaagtcccctttgattagttgaagtttcaatcccttagcttgcagct

SEQ ID NO: 9944 - DNA, 97 bp, homo sapiens
gctgctttttagctaccttatcagcataaacattgtgctgagtgatgggacctgatgcctttggatggctgctcttttagctaccttatcagcataa

SEQ ID NO: 9945 - DNA, 108 bp, homo sapiens
caccaatcggcactctgtatctagctcaaggtttgtaaacacaccaatcagcaccctgtgtttagctcaaggtttgtgagtgcaccaattgacactctgtatctagct

SEQ ID NO: 9946 - DNA, 107 bp, homo sapiens
gtgttttcatgattagtacatggccatgattagtttttcatgattagtgaaaaactaatttcatgactagttttttatgattagtgttttaatgattagtacatggc

SEQ ID NO: 9947 - DNA, 110 bp, homo sapiens
caactattctgatcagcagggtccagggaccgttgagggttcttgggcaggggttgtttctgctgctgcgtcagtgagtgcaactgttctgatcagcagggtccagggac

SEQ ID NO: 9948 - DNA, 65 bp, homo sapiens
ctgattgttgcattttacaatccccttactaactacagagcgctgattggtgcattttacaatcc

SEQ ID NO: 9949 - DNA, 117 bp, homo sapiens
atatataattgtcctagaatcaatttaaaatatggcataatatatataatcaaatataatacacattttatattttttatatatacacatatataattgtcctggaatcaatttaaa

SEQ ID NO: 9950 - DNA, 92 bp, homo sapiens
tgtgtttacaaacctttagctagacacagagtgctgaatggtgtgtttttacagaatgctgatttttgtgtttacaaacctttagctagaca

SEQ ID NO: 9951 - DNA, 92 bp, homo sapiens
tgtctagctaaaggtttgtaaacacaaaaatcagcattctgtaaaaacacaccattcagcactctgtgtctagctaaaggtttgtaaacaca

SEQ ID NO: 9952 - DNA, 101 bp, homo sapiens
cagactcacaaaattaaaaggtacattcacagactgcactggcaataggtaataactcctaacacaacagccagcagactcacaaaattaaaaggtatcat

SEQ ID NO: 9953 - DNA, 80 bp, homo sapiens
agtcaacactcattggacacctgcccagtgagcacatagtcaacacagcacacagtcaacattcattggacacctgccca

SEQ ID NO: 9954 - DNA, 125 bp, homo sapiens
gaacataaattgtgaagatttcatggacatttattatttccccaaattaatacttttataatttcttatgtctgtctttagggcaacctctgaacataaattgtgaagatttcatggacatttat

SEQ ID NO: 9955 - DNA, 125 bp, homo sapiens
ataaatgtccatgaaatcttcacaatttatgttcagaggttgccctaaagacagacataagaaattataaaagtattaatttggggaaataataaatgtccatgaaatcttcacaatttatgttc

SEQ ID NO: 9956 - DNA, 82 bp, homo sapiens
acctttgtgtggtaattaagatttagattccctgttaagaaacctacttgtccaacctttgtgtggtaattaaggtttagat

SEQ ID NO: 9957 - DNA, 135 bp, homo sapiens
gaaacaatgtggcaggtacggacacacacacatacacacacacaggactgaatcaatgtggcagggacacacacacacaagactgaatccatgtggcagggacacacacacgactgaatgtggcagggacacaca

SEQ ID NO: 9958 - DNA, 86 bp, homo sapiens
cttatgctgataaggtggctagagaagcggctagctttccaacttctgtctctcacagcaacacttacgctgataaggtggctaga

SEQ ID NO: 9959 - DNA, 93 bp, homo sapiens
gatttgcatatgttgaaccagccatgaggtttttgtctttggttcttttatgtgatggattgcatgtatggatttgcatatgttgaaccagcc

SEQ ID NO: 9960 - DNA, 111 bp, homo sapiens
tttagtggcccttactgatgcattcttgaaaacctgcacccttgcctgtcctcttagaccacaaagagaactcagaaaaatcagctttagtggcccttactgatgcattct

SEQ ID NO: 9961 - DNA, 89 bp, homo sapiens
ttctggaatattacctagtgacctggatattttcttctggaatattacctagtggaatattactttctggaatattacctagtgacctg

SEQ ID NO: 9962 - DNA, 89 bp, homo sapiens
ctttagttaaagcagcgagcccccgccactttcagtttccttgaatctcctctgttctctctctttctttagttaaagctgcgagcccc

SEQ ID NO: 9963 - DNA, 134 bp, homo sapiens
gacatgagagagggttgtttcatccaatgaggagtcctcgggtaggagtggtgtgtgtatgtatgtaaatgtgggaacctaactagtctcacccaagacatgagagagagttgtttcatccaatgaggagtcct

SEQ ID NO: 9964 - DNA, 91 bp, homo sapiens
agctagctgcttgtctagccaccttatctgcatcagaattgctgtgagagacagaagttggaaagctagctgcttgcctagccaccttatc

SEQ ID NO: 9965 - DNA, 150 bp, homo sapiens
ggttcttgccccctagaaaagcaggacttgctgctaaaggtgaaagagaaggggttgaggggttcttgccactcccccagaaaagcagagaaggggtagagacacaaaagagaaggggctaaggtacttgcccctcccccagaaaagcag

SEQ ID NO: 9966 - DNA, 121 bp, homo sapiens
gatttagtggcccttatcaatgcattctcaaaaacatgcccccttgcctgtcctcctagaccacaaaagaggaccaagaaaaattggatttagtggcccttaccaatgcattctcaaaaac

SEQ ID NO: 9967 - DNA, 186 bp, homo sapiens
agctagacacacagtgctgattggtgtatttacaatcctctagctagaagtaaaagttctccaagtccccactagattagctagacacagagtgctgattggtgcatttacaaaccttgagctaggcacagagtgctgattggtggatttacaatccttgagctacacacagagcactgattggtg

SEQ ID NO: 9968 - DNA, 108 bp, homo sapiens
aatgccaatataggttaataagtgattacataacagcacaaccagcacacacttcaaaccctccgctttacagataaagaacaaatgccactataggttaataagtga

SEQ ID NO: 9969 - DNA, 108 bp, homo sapiens
gatttagtggcccttactgatgcattctcaaaaatctgcacccttgcctgtcctagaccacaaagaggactgagaaaaattggatttagtggcccatactgatgcatt

SEQ ID NO: 9970 - DNA, 92 bp, homo sapiens
tagcaataacaattaaaacagaaaattaaaagtaagtaatattaacaagaacagggatgataacctcaatagcaataacaattacaacagaa

SEQ ID NO: 9971 - DNA, 111 bp, homo sapiens
aatgcatcagtaagggccactaaatccaattttttctggtcctccttgtgggctaggaggacaggcaagggtgcagctttcccaaaatgcatcagaaagggccactaaatc

SEQ ID NO: 9972 - DNA, 98 bp, homo sapiens
ctatgcacatgaaaaggaatttggacagattgccgggccctgtccaaattttattccactttttatccaaaactatgcacgtgaaaaggaatttggac

SEQ ID NO: 9973 - DNA, 95 bp, homo sapiens
cagctacacccaggcagggtttgtactgtttcaagttggtcccattctcttcctgcctcctcagctacacccaggcagggtttgtactgtttcaa

SEQ ID NO: 9974 - DNA, 106 bp, homo sapiens
tctagctaaatgattgtaaatgcaccactcagtgctctgtgtagagctaatcaggtaagggacttggagagcttttctgtctagctaaaggattgtaaatgcacca

SEQ ID NO: 9975 - DNA, 123 bp, homo sapiens
gaacataaattgtgaagatttcatggacatttgtcagttctccaaatgaatacttttataatttcttatgcctgtctttactgcaatctctgaacataaattgggaagatttcatggacattt

SEQ ID NO: 9976 - DNA, 111 bp, homo sapiens
ggtccctggaccctgctgatcagaatagttgcactcaccaacgcatcagcagaaacaacccctgcccaggaacccacaatggtccctggaccctgctggtcagaatagttg

SEQ ID NO: 9977 - DNA, 97 bp, homo sapiens
ttaaaactccaccaaaaaactttcagtagtcataaatgaattcagtaaatttgtttgcagacacaaaacccttaaaactccaccaaaaaaactttca

SEQ ID NO: 9978 - DNA, 111 bp, homo sapiens
caactattctgaccagcagggtccagggaccattgtgggttcctgggcaggggttgtttctgctgatgcgttggtgagtgcaactattctgatcagcagggtccagggacc

SEQ ID NO: 9979 - DNA, 84 bp, homo sapiens
atgattcatgaaaactgcctgaattttaatggatggaacacaataggtcctgatgaaaaatatgattcatgaaaactgcctgaa

SEQ ID NO: 9980 - DNA, 99 bp, homo sapiens
ataaatatataaatataaaagataaaaaaatgcagcagtgtgaataagtaaagattaaggaaaagataaataaataaatataaaagataaaaaaaatgc

SEQ ID NO: 9981 - DNA, 136 bp, homo sapiens
ttattaaaggaaattagccttatctcttattatattttattaaagaaaattattatattattcctttgtatttttattaaaggaatttattattattattattaaaggaaattagccttatatcttattatatttt

SEQ ID NO: 9982 - DNA, 111 bp, homo sapiens
aatgcatcagtaagggccactaaatccaattttttctggtcctccttgtggtctaggaggacaggcaagggtgcagctttcccaaaatgcatcagaaagggccactaaatc

SEQ ID NO: 9983 - DNA, 98 bp, homo sapiens; identical to SEQ ID NO: 9972

SEQ ID NO: 9984 - DNA, 95 bp, homo sapiens; identical to SEQ ID NO: 9973

SEQ ID NO: 9985 - DNA, 123 bp, homo sapiens; identical to SEQ ID NO: 9975

SEQ ID NO: 9986 - DNA, 111 bp, homo sapiens; identical to SEQ ID NO: 9976

SEQ ID NO: 9987 - DNA, 97 bp, homo sapiens; identical to SEQ ID NO: 9977

SEQ ID NO: 9988 - DNA, 111 bp, homo sapiens; identical to SEQ ID NO: 9978

SEQ ID NO: 9989 - DNA, 123 bp, homo sapiens
aaatgtccatgaaatcttcccaatttatgttcagagattgcagtaaagacaggcataagaaattataaaagtattcatttggagaactgacaaatgtccatgaaatcttcacaatttatgttc

SEQ ID NO: 9990 - DNA, 95 bp, homo sapiens
ttgaaacagtacaaaccctgcctgggtgtagctgaggaggcaggaagagaatgggaccaacttgaaacagtacaaaccctgcctgggtgtagctg

SEQ ID NO: 9991 - DNA, 95 bp, homo sapiens
gtgcatagttttggataaaaagtggaataaaatttggacagggcccggcaatctgtccaaattccttttcatgtgcatagtttgggataaaaagt

SEQ ID NO: 9992 - DNA, 111 bp, homo sapiens
gatttagtggccctttctgatgcattttgggaaagctgcacccttgcctgtcctcctagaccacaaggaggaccagaaaaaattggatttagtggcccttactgatgcatt

SEQ ID NO: 9993 - DNA, 105 bp, homo sapiens
tatttatcttttccttaatctttacttattcacactgctgcatttttttatcttttatatttatatatttatcttttccttaatctttacttattcacactgctg

SEQ ID NO: 9994 - DNA, 92 bp, homo sapiens; identical to SEQ ID NO: 9970

SEQ ID NO: 9995 - DNA, 296 bp, homo sapiens
acctcccagactcaagtgatgctcctgcctcagcctcctgagtggctgggacttactctgttgcccaggctagaatgcagtggtgcaatcatggctcactacagcctcaacctcccagactcaagtgatgctcctgcctcagcctcctgagtagctggggctacaggtgtatgccaccaggcccagctaatttgtaaaaattttttgtagagatgaggtctcactatgttgcccaggctggtcttgaactcctgggctcaagcaatccttctgtctccgcctcccaaagtgctggg

SEQ ID NO: 9996 - DNA, 91 bp, homo sapiens; identical to SEQ ID NO: 9868

SEQ ID NO: 9997 - DNA, 63 bp, homo sapiens
tgtctagctaaaggattgtaaaggcaccaatcagcactctgtgtctagctaaaggtttgtaaa

SEQ ID NO: 9998 - DNA, 114 bp, homo sapiens
aagtgaattaacatagaaatagaaaacataggccattattctaagtgaattagcaaagaaagtgaaattaacatagaaataatttctatgttaataggaattaacatagaaata

SEQ ID NO: 9999 - DNA, 106 bp, homo sapiens
aggcccctcctccaattcaacatgagatttgggtgggggaaaccctcccccatgatccattcacctcccactaggcccctcctccaattcgacatgagatttgggt

SEQ ID NO: 10000 - DNA, 77 bp, homo sapiens
gtgaattttctggtatgcaaattatgccggcctgaattgagtatttaatagagtgaattttctggtatgcaaattat

SEQ ID NO: 10001 - DNA, 112 bp, Homo sapiens
ccattggcctcaatgagctcccagatatcccttcacagattcttcgaaaacagtgtttccaaactgctgaaagtttaacatttttgccattggcctcgatgagctcccagat

SEQ ID NO: 10002 - DNA, 112 bp, Homo sapiens
atctgggagctcatcgaggccaatggcaaaaatgttaaactttcagcagtttggaaacactgttttcgaagaatctgtgaagggatatctgggagctcattgaggccaatgg

SEQ ID NO: 10003 - DNA, 105 bp, Homo sapiens
gtggggacttggagaatctttctgtctggctaagggcttgtaaatgcaccaatcagcgctctgtgtctagctaatctggtggggacttggagaatctttatgtct

SEQ ID NO: 10004 - DNA, 84 bp, Homo sapiens
ctagttcccatattatctcctaagctatgcacacacatatacatatatataccttcactagttccaatattatctcctaagcta

SEQ ID NO: 10005 - DNA, 93 bp, Homo sapiens
tcacttcagcccctgattggtcctgggccaaactttcacttcagcccctgattggtcttgggccaaaatttcacttcagcctctgattggtcc

SEQ ID NO: 10006 - DNA, 116 bp, Homo sapiens
gtgtaagatctaatcaagtcttggttgactaatgaatttcctcttctttgtatgttgtgggagaggacatcattccctttttggaagggtgtaagatctaatcaagtattggttga

SEQ ID NO: 10007 - DNA, 102 bp, Homo sapiens
aatttcatattaatttccgtatgaatttcctccaaaaagtcctttcagactttgataaggattgctttaaataaatttcatattaatttccatatgaatttc

SEQ ID NO: 10008 - DNA, 97 bp, Homo sapiens
acaccttctaatccaacagatccatctcaaaaaaaaaaaaaaaaagaattatctgtccagctgctggtagtcacaccttctaattcaacagatccat

SEQ ID NO: 10009 - DNA, 81 bp, Homo sapiens
tagtactggaagtcctagccagaacagtcagacaagagttcaccacttctattgtacgtagtactggaagtcctagccaga

SEQ ID NO: 10010 - DNA, 82 bp, Homo sapiens
agtttttgccactgaaagtaattgcaacacattaggttggtggaaaagtaattacagttttcgccactgaaagtaattgcaa

SEQ ID NO: 10011 - DNA, 170 bp, Homo sapiens
atattccatactttattataaaatagtctttgtgttagattatttcaccccactctgtgatccaacaattcattatatccaacaatttattataaatatataataataataatatatccaacaatatattgttggatataataaatatccaacaatttattataaaatag

SEQ ID NO: 10012 - DNA, 101 bp, Homo sapiens
caatcatgtgatttataacatgtgactaattgttcttatttcataggcaactttctagtataccgcaatcatgtgatttataacatgtgaccaattgttct

SEQ ID NO: 10013 - DNA, 285 bp, Homo sapiens
ccattttacagagagctgattggtccattttatagagagctgattggtccgttttgacagagtgctgattggtgcatttacaaacctttggctagacacagagtgctgattggtgcatttacaatcctttagcaagacacaaaagttctccaagtcccctacccaattagctagacacagagtgctgattggtgcgtttacaaacctttagctagacacagagtgctgattggtgcatttacaaacctctagctagacacagagtgctgattggtgcatttacaa

SEQ ID NO: 10014 - DNA, 398 bp, Homo sapiens
ctgagcgtcccctggtggttctgagcgccccctggtgacctgagcccagaattgttgtctttagcaccacctatgtcctgagcgcccccttgtggttctgagcaaccattggtggtcctgagcgccccctgttggttctgagtaccccctcttgtcctgagtgtccccgagtgtttctgagcgccccctggtgtcctgagcgccccctggtggtgctgagcgccacctggtggttctgagcgccctctggtggttctgagcgccccctggtggttctgagtaccccgtggtgacatgagtgcagcagtgttgtcttgagcgccacctagtgtcctgagcgtcccctagtggttctgagcacccccctggcgtcctgagcgctccctagaggtcctaag

SEQ ID NO: 10015 - DNA, 98 bp, Homo sapiens
cttgtagaagtgatttttgtaggactaagggtggcatcactgtagggttaaacagggagttgctgggaagatatccttgtagaagtgatttttgtaag

SEQ ID NO: 10016 - DNA, 233 bp, Homo sapiens
gattctcctgcctcaacctcccaagtagctgggattactgcaaccttcgcctcccaggttgaagcgattctcctgcctcaacctcccgagtagctgggattacaggcatgtgccaccagacctggctaattttttgtatttttggtagaaacagggtatgttagccaggctggtctcgaactcctgacctcagatgacctgcccgcctcagcctcccaaagtgttggaattac

SEQ ID NO: 10017 - DNA, 78 bp, Homo sapiens
gtgtgccgtagctttgcaggtgtgtcaccatcggaggtggacagaggttgatgagtgtgccgtggctttgcaggtgtg

SEQ ID NO: 10018 - DNA, 125 bp, Homo sapiens
ctgcttcccacagcatgtcatccaaaagcatggcaaagaagtttgtaggcagccccatctgagcctatgctgtagagcacgctccctggactatgtcttccaaaagcatggcaaagaaggcaggc

SEQ ID NO: 10019 - DNA, 103 bp, Homo sapiens
ccagctactcaggaggctgaggcagaggatcgcttgaacctgaaagggggagggtagtggtggcgggcacctgtaatgccagctactcgggaggctgaggcag

SEQ ID NO: 10020 - DNA, 99 bp, Homo sapiens
tgaaactcccctgtgggttcctcatatcctaaggtgaaagttataaagttgaagatgaaaagctgactggcctgaaactcccctgtggtttcctcatat

SEQ ID NO: 10021 - DNA, 106 bp, Homo sapiens
ttcctcgtgaaccccagtcgcgcctctgccttctcaaacccctccaccatcccacaccctcctcctgcccttcctcatgaaccccagtcgcgcctctgccttctca

SEQ ID NO: 10022 - DNA, 133 bp, Homo sapiens
gagagaggctagtttcctccaataaggagtcctggggtaggagtggtgtgtgtatgtgtgtgaatgtaggagcctaactaggctcacccgggacacgagagaggctcgtttcctccaataaggagtcctgggg

SEQ ID NO: 10023 - DNA, 887 bp, Homo sapiens
ctcagaaccaccagggggtgctcaggacatcagggggcgctaagaaccatcaggagatgctcaggacaccagggggtgctcaggacaccatgggttactcaaaaccaccagggggcgctcagaacacaagggggcactcaaaaccaccagagggtgctcagaaccaccatggggcactgatgacaagaaaggatgttcagaaccacctgggggtgcggagcctcaggaaaacagcgggtgctcagaaccaccagggggcactcaggacactggggtgggggtcactcagaaccaccagggggcactccagacacggtggtgaggggtagctcaggatagcaggggtgctcagaaccaccagggagcgctcaggacactgggggggggggggtcactcagaaccaccagggggcactccagacactgtggtgaggggtagctcaggatagcaggggtgctcagaaccaccagggggcactcaggacacttggtgggggtcactcagaaccaccaggggacactggagacaccagggagccctcaggacactagggggagctcagaaacaccaaagggcaatcaagacaccagggggatctcagaaccaccaggaggtgctcaggacaccaggggtctcagaaccactagggtgtgctcagaaccacgagggggccctcaggaccccaggggatgctcagatccactagggggatcttaggaccccagggggctcagaaccactagggggttttgaggacaccagggggcgctcaggacaccagggggtgctcagaaccaccagggggtactcaggaaaccaggggactcagaaccactagggagcactcaggacatgaggaggcactcagaaccaccggggacgatcg

SEQ ID NO: 10024 - DNA, 117 bp, Homo sapiens
acaatgaggcagggagacatgggtttgctgtcacatcaccaggggctggtaaaggagcaggttgtatagctctggccacaatgaggcagggagacatgggtttgctatcacatcacc

SEQ ID NO: 10025 - DNA, 111 bp, Homo sapiens
tcccaaagtgctgggattacaggcatgagccaccgcgcccagccattctcctgaccttgtgatccaccctcctcagcttcccaaagtgctgggattacaggcgtgagccac

SEQ ID NO: 10026 - DNA, 72 bp, Homo sapiens
cccccccacctccctcctggacgaggcagctggccgggcggggggctgacccccccccccacctccctcccg

SEQ ID NO: 10027 - DNA, 71 bp, Homo sapiens
agaagtagaaatctattaactaacatattaatatcaaagtgaagctagagaagtagaaatctattaactaa

SEQ ID NO: 10028 - DNA, 71 bp, Homo sapiens
ttagttaatagatttctacttctctagcttcacttggatattaatatgttagttaatagatttctgcttct

SEQ ID NO: 10029 - DNA, 72 bp, Homo sapiens
ttgtcaatttctataaaaactatggaaatataggaaaatttgagaaactttgtcaatttctataaaaactgt

SEQ ID NO: 10030 - DNA, 96 bp, Homo sapiens
gagctgcgttctcctcagcacaggatgaggtgtgttctgctcagcacagacccggggggccaccgcgaaggcagagcagcgttctcctcagcacag

SEQ ID NO: 10031 - DNA, 78 bp, Homo sapiens
acattcttatgaacagaagtccaaggttagcatcagtgactgagccaatagtgacacattcttatgaacagaagtcta

SEQ ID NO: 10032 - DNA, 123 bp, Homo sapiens
tttttcttaattttattgactcattcatgtcttagtcttttttattacaagttacttattgtttagtcactaccttacagccgttttatttttcttaattttattgactcatttatgtcttag

SEQ ID NO: 10033 - DNA, 114 bp, Homo sapiens
gagcctcctgagggcagggacagtgtctcccccatcagactgagggcactcagagagaatgaattatgtctcccctctcagaccaagagcctcctgagggcagggacagcgtct

SEQ ID NO: 10034 - DNA, 82 bp, Homo sapiens
ggcttgggctgggtgcaggggaggttgccttgtgttggggagtcaaacggactgggcttgggctgggtgcaggggaggttgc

SEQ ID NO: 10035 - DNA, 114 bp, Homo sapiens
attttaggacttaaaataatatttctccaaaaaagaaaactcagcttttgtgccagacatgccttgagattccatataaattttaggacttaaaataatatttctccaaaaaag

SEQ ID NO: 10036 - DNA, 93 bp, Homo sapiens
aaataataccatttaaagcctaaataatactatttaggctaaataaataaataaaggtccaaataatactatttaaagcctaaataatactat

SEQ ID NO: 10037 - DNA, 110 bp, Homo sapiens
acttggggggtcgttgaaacctgtcaggctcaggaacagatggtgctccagctttgtggagatgaatttcaaggtatggagcacttggggggtctttgaaacctgtcagg

SEQ ID NO: 10038 - DNA, 98 bp, Homo sapiens
agatagcttctttctcatttttgtctggggatgtttgttttttcacacatcacaaaggagtttcaaagatagcttctttctcatttttatctggggat

SEQ ID NO: 10039 - DNA, 113 bp, Homo sapiens
attctgagcaacttctttgtgatgtgtgcgttcacatcacagcttgtggaaaaaaaaatcttcaaataaaaactacacggaagcattctgagaaacttctttgtgatgtgtgc

SEQ ID NO: 10040 - DNA, 93 bp, Homo sapiens
acatgcactgaaccctatgtagaaggggattaggtcctgggggctgcagatgtggttgctgggcctgtgacatgcactgaaccctatgtagaa

SEQ ID NO: 10041 - DNA, 100 bp, Homo sapiens
agagatggggtttcaccatgttgaccaggctcatctcgaactcacctggctaatttttgtatttttagtagagatggggtttcaccatgttgacaaggct

SEQ ID NO: 10042 - DNA, 111 bp, Homo sapiens
atacagatgaggtgggcggacagtatgcagatgacgggggcgggccgcgcctggcgggcggtgtgcagttgaggtggtccggcaggatgcagatgaagggggcgggccgcg

SEQ ID NO: 10043 - DNA, 131 bp, Homo sapiens
aaaagctgaataatacccctttaatttagccaatgtccacacactggctattttaatttgctctaagaaaccaattttaatttatagaaaaactgaataatacccctttaatttagccaatgtccacacac

SEQ ID NO: 10044 - DNA, 90 bp, Homo sapiens
aagcatctaaaaaattgccattttttaaaggcttaaattgtagtagtaaagggggaaaaaacccataaatcatctaaaaaattgccattt

SEQ ID NO: 10045 - DNA, 106 bp, Homo sapiens
agtccctggattccacctcctgttctccgtattttcaaacatgttctcgaacatgggtttgacctttccgaagtatcgctagtccctggattccacctcctattct

SEQ ID NO: 10046 - DNA, 76 bp, Homo sapiens
gtttcttacgtatattctgagacacaggccaggttcttgtatgagatgccatgtttcttaggtatattctgagaca

SEQ ID NO: 10047 - DNA, 90 bp, Homo sapiens
tatgaacacttaataaaacccacctgttgctgttatttccaaatatttatgagggattcatacatatgaacatttaataaaacccacctg

SEQ ID NO: 10048 - DNA, 83 bp, Homo sapiens
atattaactattttaactggggacctgcaaggtccaatttacctcataattatagcaatattaactatttttactggggacct

SEQ ID NO: 10049 - DNA, 109 bp, Homo sapiens
gttgtccacttggagcctggagttttcacctggggcctggtagacatctggccccagtaaacatcagcctggggcctggttgtccacttagagcctggagttttcacct

SEQ ID NO: 10050 - DNA, 121 bp, Homo sapiens
aattttctctataaatctcttcttttactagtttttgctttttatatttactatgatgtggggagaatgcagattttgagtgttctttataattttctctataaatctcatcttttactag

SEQ ID NO: 10051 - DNA, 99 bp, Homo sapiens
tgctggaattacaggcatgagccaccgtgcctgacctcaagtgatccacccaccttggcctcccaaaatgctggaattacaggcatgagccaccgtgcc

SEQ ID NO: 10052 - DNA, 106 bp, Homo sapiens
agtccctggattccacctcctgttctccgtattttcaaacatgttctcgaatatgtgtttgacctttctgaagtatcactagtccctggattccacctcctgttct

SEQ ID NO: 10053 - DNA, 115 bp, Homo sapiens
ccccccttttctcatttctagtgcagcagccctcccttcccagggctccctgccccccacattctccctttgccccccttttccatttctagtgcagcagccctcccttcccagg

SEQ ID NO: 10054 - DNA, 125 bp, Homo sapiens; identical to SEQ ID NO: 7243

SEQ ID NO: 10055 - DNA, 81 bp, Homo sapiens
cagagtgagactatctcaatagaataagaagagaaagaagaagaagaacaaattaagcagagtgagactgtctcaatagaa

SEQ ID NO: 10056 - DNA, 146 bp, Homo sapiens
ttttaaacctcaggaaatttgaaagaattgtatgatatatccaatgtaactaagttgtatatttattttgagcatatcattcccctacctattttttgaaaagttttaaacctcaggaaatttgaaagaattgtatgatatatcca

SEQ ID NO: 10057 - DNA, 100 bp, Homo sapiens
tctctactaaaatacaaaaatcagctgggcaaagatcaagaccatcctggccaatgtggtgaaaacccgtctctactaaaatacaaaaatcagctgggca

SEQ ID NO: 10058 - DNA, 95 bp, Homo sapiens
agttttgcctgcttccttctgtgtagtttatctgggaagcaaacataattacataaaatagacaatacatagttttgcctgcttccttctctgta

SEQ ID NO: 10059 - DNA, 102 bp, Homo sapiens
gattgagtctaccttctttccttggcccgctccctttttcttctgcctcacttgaatcccccgtaaacaccagacgattgagtctaccttcttttcttggcc

SEQ ID NO: 10060 - DNA, 77 bp, Homo sapiens
gctgggagagactttggaaagcacccagtttaaggtctttatttcagagatgaggctgggagagactctggaaagca

SEQ ID NO: 10061 - DNA, 133 bp, Homo sapiens; identical to SEQ ID NO: 8240

SEQ ID NO: 10062 - DNA, 84 bp, Homo sapiens
tgtgtgtacgtgggggtagggtgagagccgtgtgtgtgtgtgtgtgtgtgtgtgtatgtgtgtacgtgcgggtagggtgagagc

SEQ ID NO: 10063 - DNA, 156 bp, Homo sapiens; identical to SEQ ID NO: 8343

SEQ ID NO: 10064 - DNA, 96 bp, Homo sapiens
attcattcattcatcatctatatccatctataacacatcaacccgctcacttatccatccatccataattcattcattcatcatctattatccatc

SEQ ID NO: 10065 - DNA, 249 bp, Homo sapiens
atgtgaggacgcaggggtgtgtggctgtccatcccaccgtgagggtgcaggtgtgtctgtactcctccgtgctgggtcctggggtgtgtgtgcaggtgtgtctgtctccacctctgcaccaggtcctggggtgagtgtgtggctgtctgtcccaccgtgagtgtgcaggtgtgtctgtactcctccacaccaggtcctggggtgagcatgcagctgcccgtcccgccgtgcgtgtgcaggtgtgtctgt

SEQ ID NO: 10066 - DNA, 88 bp, Homo sapiens
ggtaagaacggctgcacagacgcacgggagatatgaggaagggagcctcctgcttgtgcgtctgtggtaagagcggctgcacagacgc

SEQ ID NO: 10067 - DNA, 133 bp, Homo sapiens
gcctgctgtgaatctcgtttctgctccctggtttctgcctggctgtcaccatgggcatctgcctgaaggcagcagttccccgccttcccgcctgctgtgaatctcatttctgctccctggtttctgcctggct

SEQ ID NO: 10068 - DNA, 106 bp, Homo sapiens
tgtatttgtgcacacattggtgtgtgttgtgtgtatggtgtatgtgtgttgtatgtatggtgtgtatgtatggttgtgcatgtatttgtgcacacattggtctgtg

SEQ ID NO: 10069 - DNA, 81 bp, Homo sapiens
gtcctcctggcctgctgtctgcctctcccctgcacctgtgcgtctgtccctcttcatgtcctccttgcctgctgtctgcct

SEQ ID NO: 10070 - DNA, 95 bp, Homo sapiens
ttacaagccagccaagccactgccacgcgtgtggcgtgcgcgcgcggcatgcacgtgcaagccgttacaagccagccaagccactgccgcgcgtg

SEQ ID NO: 10071 - DNA, 77 bp, Homo sapiens
ttcctgggtgggggctccccagggggcctggggagggtgaagagggtggggtccttcccgggtgggggctccccagg

SEQ ID NO: 10072 - DNA, 123 bp, Homo sapiens
acaacactaatttattcatttacaggtccagacatcagaattccagcacgagtctccgcaggcagggcctcctggaggctctaggggagaaacaacactcatttattcatttacaggtccaga

SEQ ID NO: 10073 - DNA, 101 bp, Homo sapiens
tggggcaggcactggtgatgctgtgtggtgaggacagcctttaaggggagccccatgcctgtatggggcagggactggtgatgctgtgtggtgaggacagc

SEQ ID NO: 10074 - DNA, 76 bp, Homo sapiens
tacaaaaagagtgcttcaagactgtactttcagggatcatttctatagtttgttacaaaaagagtgcttcaaaact

SEQ ID NO: 10075 - DNA, 111 bp, Homo sapiens
tctctactaaaaatacaaaatttagccaggacagatcacgaggtcaggagtttgagatcagcctggccaatatggtgaaaccccgtctctactaaaaatacaaaaattagc

SEQ ID NO: 10076 - DNA, 108 bp, Homo sapiens
ttttgaatttcccatatcttcacaaggaatttgattcaggtgataacgagcttgcttcttagttaaaggattttgaatttcccatatcttcacaaggaatttggttca

SEQ ID NO: 10077 - DNA, 71 bp, Homo sapiens; identical to SEQ ID NO: 1849

SEQ ID NO: 10078 - DNA, 101 bp, Homo sapiens
agtacaaagtaataacaagaaaaaagatgtttaaaatacattttgaaaaactcacaaagcgagtctctatggaaatcagtacaaagtaataataagaaaaa

SEQ ID NO: 10079 - DNA, 143 bp, Homo sapiens
cccttatcagtagttctgcttttgccctttgccttgtgatctttgttgtacccttattggtagttctgctttttgcactttgtcctgttccctcagaagcatgtgatctttgttagccccttattagtagttctgctttttgc

SEQ ID NO: 10080 - DNA, 108 bp, Homo sapiens
gagcctttcactaatgataacacactcattctccttcttcatgtgtcactattaaatgtgaacggtgaagaatcacctccagacgagcctttcactaatgataacaca

SEQ ID NO: 10081 - DNA, 115 bp, Homo sapiens
cagcctccagaactgtaagaaatcactatgcattgtttaagccaccccagtctatgatatggtgttaagccacccagtccatgatacagcctccagaactgtaagaaatcactat

SEQ ID NO: 10082 - DNA, 111 bp, Homo sapiens
ctcaatgttcacaattttcacctgtttgtaactgaaaaccaaaaggagttagattacaccacctgttttacaatccatgctaggctcaatgttcacaattttcacctgttt

SEQ ID NO: 10083 - DNA, 144 bp, Homo sapiens
tcaaaataataagagctatttatgacaaacccacagccaatatcatactgaatgggcaatatcatactgaataataaaagattattttattatctcaaaataataagagctatttatgacaaacccacagccgatatcatactg

SEQ ID NO: 10084 - DNA, 60 bp, Homo sapiens
tgtatgtataaatattaatatcctaaagtaatactaatgtatgtataacatttattaata

SEQ ID NO: 10085 - DNA, 130 bp, Homo sapiens
tgaagggatatttgggagcacatgaggcatatggtgaaaaaaggaaataacttcagataaaattggaaatgctgtttttgcagaatctctgaagggatatttgggagcacaggaggcatatggtgaaaaa

SEQ ID NO: 10086 - DNA, 71 bp, Homo sapiens
aagggtgcattgatgtctatggtgaaaaagaaaaagaaaatacctgagaagggtgcattgaggtctatggt

SEQ ID NO: 10087 - DNA, 98 bp, Homo sapiens
gacacccctggttggaaaggtggcctccagtgcaagcccattgctatgtctgagtgtgcgcggacacccctggttggaaaggtggcctccagtgcaag

SEQ ID NO: 10088 - DNA, 98 bp, Homo sapiens
gagaaggggatgctcttgcctgctgccttccatgttcgaaggggtggaaataggactgagggctcttctcagagaagggcatgctcttgcctgctgcc

SEQ ID NO: 10089 - DNA, 104 bp, Homo sapiens
gcgggagaagccgctgttagcatctgccagggtgaccctttacagaaactgcgtcagcctgaggacgcagggacaggctgtgcggagaagccgctgttagcatc

SEQ ID NO: 10090 - DNA, 103 bp, Homo sapiens
gagaaggaggaaaaaatgggcagagcacaggggggtttaggacagtgaagctcttccatagggaagattgggagaaggagggaaaaaatgggcagagcacagg

SEQ ID NO: 10091 - DNA, 108 bp, Homo sapiens
gttgtatttctatatactactgatgactaatttaaaacatcacaggacaccaggtcaacatataaagataggttgtatttctatatactgctgatgactaatttaaaa

SEQ ID NO: 10092 - DNA, 73 bp, Homo sapiens
tacgtgaatatttactgattgatttttctcctcattatattttgtgaatatacgtgaatatttattgattgat

SEQ ID NO: 10093 - DNA, 269 bp, Homo sapiens
gtccgggagggaggttggggggtcagccccccgcccggccagccgccccctctgggaggtgaggggcacctctgcccggccgcccctactgggaagtgaggagcccctctgcctggccgcccgccccgtccaggagggaggtgggggggtcagccccccgcccggccagccgccccgaccgggagggaggtgggggggtcagccccccgcccagccagccgccctgtccaggagggaggtgggggggtcagccacccgcccggccagcc

SEQ ID NO: 10094 - DNA, 481 bp, Homo sapiens
tgggaggggccggtgtgaggcaaggggtcagtgtgggaggggccagtgtgaggcaaggggctcacgcccacctctcagcgtgggaggggccggtgtgaggcaaggggtcacgctgacctctctctgcgtgggaggggccagtgtgaagcaaggggctcacaccgacctctgtcagcgtgggaggggccagtgtgaggcaaggggctcatgcggacctctctcagcgtgggaggggccggtgtgaggcaagggctcacgctgacctctctcggcatgggaggggccggtgtgaggcaaggggtcagcgtgggaggggccagtgtgaggcaaggggctcatgcggacctctctcagcgtgggaggggccggtgggaggcaagggctcatgctgacctctctcggcgtgggaggggccggtgtgaggcaaggggctcacgctgacctctctctgcgtgggaggggtcggtgtgaggcagggact

SEQ ID NO: 10095 - DNA, 389 bp, Homo sapiens
tgggaggggccagtgtgaggcaaggggtcagcgtgggaggggcccgtgtgaggcaaggggtcagcgtgggaggggcccgtgtgaggcaaggggtcagcatgggaggggctggtgtgaggcaaggggtcagcgtgggaggggccggtgtgaggcaaggggtcagcgtgggaggggccggtgtgaggcaaggggtcagcgtgggaggggccggtgtgaggcaaggggtcagcatgggaggggccggtgtgaggcaaggggtcagcatgggaggggccggtgtgaggcaaggggctcacgccgacctctctcagcgtgggaggggccggtgtgaggcaaggggctcatgccgaccttcctcagcgtgggaggggtcggtgtgaggcagggac

SEQ ID NO: 10096 - DNA, 205 bp, Homo sapiens
caacaggccagcgtgagggaggacttccctcagcgtgagagaggccactgtgaggcagggcctcacgctgacgtccctcagcgtgagagaggccagtgtgaggcagggcctcacgctgacctccctcagcgttagagaggccactgtgaggcaggggctcacgatgacctccctcagcgtgagagaggccaatgtgaggcagggg

SEQ ID NO: 10097 - DNA, 90 bp, Homo sapiens
gaaccaaatacaatatagcataatgaagacaaaggcataattactggaataatagcacataagaaccaaatacaatacagcataatgaag

SEQ ID NO: 10098 - DNA, 94 bp, Homo sapiens
taaagccattacatgttgatataatacaagattttaaaaatatttaatattcatcacatattaataataaaaccattacatgttgatataatac

SEQ ID NO: 10099 - DNA, 88 bp, Homo sapiens
ctgctgatcccacagtgaggggtgtgtgccacctggggtatgggcgctcgtgaatgagggtccctgctgatcccacagtgaggggtgt

SEQ ID NO: 10100 - DNA, 80 bp, Homo sapiens
ccgtctctactaaaaatacaaatatttcctgacctcgtcatccgcccgcctacgccccgtctctactaaaaatacaaaaa

SEQ ID NO: 10101 - DNA, 99 bp, Homo sapiens
tgtactatgttattaatatattgtattatgttattaatatattgcgtattatgagaaatgcttctgagaaagttctgtattatgttattagtatattgc

SEQ ID NO: 10102 - DNA, 92 bp, Homo sapiens
ctgcacctgactagaatatcttttcttctggctcagcctcccaaagtgttgggataaaaggctgagcccctgcacctgactagaatatcttt

SEQ ID NO: 10103 - DNA, 128 bp, Homo sapiens
gttacaagagaatgtcttaccccacccccacggacccagaaagggtccttctgggagaagagatatgttacgtatgttactttcgttacaagagaatgtcttaccccacccccacggacccagaaagg

SEQ ID NO: 10104 - DNA, 103 bp, Homo sapiens
ctcacacctgtaatcccagcactttgggaggccgaggcaggcggatcacatcttgggcctggcacggtgactcacacctgtaatctcagcactttgggaggcc

SEQ ID NO: 10105 - DNA, 87 bp, Homo sapiens
taccagggccctcgcagattaagtagagcaaaaataggggacatttcttaatcaccctagtaccagggccctcgtagattaagtaga

SEQ ID NO: 10106 - DNA, 78 bp, Homo sapiens
caatactagatgtctgagatgctacacccaaggaagtccaataaggaattctagtcaataccagatgtctgagatgct

SEQ ID NO: 10107 - DNA, 104 bp, Homo sapiens
cattataacattcctgtcccactggaaatgcagaagaccgggttaaaaaaccctaagcggaccaagcccattataacattcctgtcccactggaaatgcagaag

SEQ ID NO: 10108 - DNA, 87 bp, Homo sapiens
caattaagttagatctctttcagtgtctccatcataattttgcaaaggcataattttgcaattaagttagatctctttcactgtctc

SEQ ID NO: 10109 - DNA, 96 bp, Homo sapiens
agacgcggaactgctgcgctgggctgtccgcctgtgccgcggacccaggagccgacccgggggtgggagacgcggaactgctgcgctgggctgtcc

SEQ ID NO: 10110 - DNA, 80 bp, Homo sapiens
tcctgcagtatcatgcaatacataaaacagcactgggcgtttcacgtgtccctggattcctgcagtatcatgcgatacat

SEQ ID NO: 10111 - DNA, 105 bp, Homo sapiens
ctgctcagttttgctgtgaactttgaactgctcttaaaaataatgtgtgtatgtgtatatatatataccttctgctcagttttgctgtgaactttaaactgctct

SEQ ID NO: 10112 - DNA, 79 bp, Homo sapiens
ttaaaaggtaatagggatgcatgtgtccccattaaaggacttgccttgttccattaaaaggtaatggggatgcatgtgt

SEQ ID NO: 10113 - DNA, 84 bp, Homo sapiens
agctctcagcagagagggcagctcctctctgcaggcaggtcatcttgttgtctcttcagctctcagcagagagggtagctcctc

SEQ ID NO: 10114 - DNA, 116 bp, Homo sapiens
agccgggcgtggtggcgggcgcctgtagtctctcacacacacacacacacacacacacacacacacacacacacacacactctcttagccgggcgtggtggcgggcgcccgtagtc

SEQ ID NO: 10115 - DNA, 118 bp, Homo sapiens
ggacaggaacgggggaggtgcggacaggatcggggggaggcgcggacaggagcggggggaggcgcggacaggagcggggtgggggcgcggacagaagcggggtggggcgcagacagga

SEQ ID NO: 10116 - DNA, 94 bp, Homo sapiens
atcctgggcccctgcccctgtaatttcagccctgctggtgtcagctgtctcagtgaacacctatccagcatcctgggcccccgcccctgtaatt

SEQ ID NO: 10117 - DNA, 112 bp, Homo sapiens
gaagaagttgaatctctgaatagaccaataacaggctctgatacacatacaccctcccaagactaaacgaggaagaagttgaatctctgaatagaccagtaacaggctctga

SEQ ID NO: 10118 - DNA, 75 bp, Homo sapiens
tctggtggggccttggagaacctttgtgtcaacactctgtatctagctaatctggtggggacttggagaaccttt

SEQ ID NO: 10119 - DNA, 96 bp, Homo sapiens
gaagcaacagcctgggctccagggtcagacaccgcactcaccagactatggaggattcaccaccagactgagaagcaacagcctgggctccagagt

SEQ ID NO: 10120 - DNA, 120 bp, Homo sapiens
tataaagtcaaaggaaatcattttaaagctttaaaatttaactgcccacctcttacatcagcgtaactggaatgtaaagtataaagtcaaaggaaatcattttaaagatttaaaatttaa

SEQ ID NO: 10121 - DNA, 99 bp, Homo sapiens
actaacacctaaaaatggtcaagaaggtaatggaccttcttggaactaacctaaaacctaaaaaagtgaactaacacctaaaaatggtcaaaaaggtaa

SEQ ID NO: 10122 - DNA, 87 bp, Homo sapiens
aagtggctagacaagcagctagctttccaacttctgtctctcacagcaacgcttatgctgataaggtggctagacaagcagctagct

SEQ ID NO: 10123 - DNA, 100 bp, Homo sapiens
ggaacagaaaactaaataccacatgttgtcacttgcagaatggagctggaggccgttatccataacaaattatgcaggaacagaaaaccaaataccacat

SEQ ID NO: 10124 - DNA, 138 bp, Homo sapiens
tgtcagcgggaagggcatgtactatatggcccacataatcaacgagtgctatctgaaggtctagagatatactcctgagataagaactggagtagactgtcagcaggaagggcatgtactatatggcccacataatca

SEQ ID NO: 10125 - DNA, 146 bp, Homo sapiens
aacattagttctccacaaatggtttctaaccaaaatggaaactcaaaaatgacaaagaattcaaagaattcaaatggagtgtaatgactccactaaatgataacattagttctccacaaatggtttctaaccaaaatggaaactca

SEQ ID NO: 10126 - DNA, 94 bp, Homo sapiens
ttatttggagttgataatacttcagctacaaccaagcagaatctctttttttttggaggacctcgaagcattatttggagctgataatacttca

SEQ ID NO: 10127 - DNA, 89 bp, Homo sapiens
tctacaccattacagtgtagcaagacacccatctctatgccctggaatggtgtagactgttttatatctacaccattacagtgtaacaa

SEQ ID NO: 10128 - DNA, 90 bp, Homo sapiens
gacagaagggaacatatttgagagatcattattaacaacgtggtagtcacagtcaagagagacagaaggggacatatttgagagatcatt

SEQ ID NO: 10129 - DNA, 100 bp, Homo sapiens
atgtttattgcagcattatttagaataaaaatcaaaggaatataaatcattctatgaagacacatgcacacacatgtttattgcagcattatttacaata

SEQ ID NO: 10130 - DNA, 106 bp, Homo sapiens
atccgaaggtcatcaacatcaaagaccaaaagaatagtatcaacatcaacaaaaagtacatccacacagaaaccctatcctaaggtcatcaacatcaaagaccaaa

SEQ ID NO: 10131 - DNA, 82 bp, Homo sapiens
gagacagacagcaacacaataatagtggcgaacttcaatattctactgacagcagagatagacagcaacacaataatagtgg

SEQ ID NO: 10132 - DNA, 116 bp, Homo sapiens
tatacacattcttatatactgacagattctttacatttagatgttaatggaattccctgttgcctcaaccccttttgtatacacattcttatatactgacagattctttgcattta

SEQ ID NO: 10133 - DNA, 89 bp, Homo sapiens
caatcaattccaatacaaaagttagtattttctttctttttattgaaaattaatttaatcagaatacaatcaattccaatccaaaagtt

SEQ ID NO: 10134 - DNA, 116 bp, Homo sapiens
gtaatttataaagaacagaaatttatttctcacagttatgctgctgtgttttgctttatgacaaaacacctgagactgagtaaattataaagaacagaaatttatttctcacagtt

SEQ ID NO: 10135 - DNA, 961 bp, Homo sapiens
tgggaagtgaggagcgtctctgcttggccacccatcgtctgggatatgaggagcccctctgcctggctgcccagtgtggaaagtgaggagcgtctctgcccggccgccatcccgtctaggaagcgagaagcgcctcttccccgccgccatcccatctaggaagtgaggagcgtctctgcccggccgcccatcgtctgagatgtggggagcacctctgccccaccgccctgtctgggatgtgaggagcgcctctgctgggccgcaaccctgtctgggaggtgaggagtgtctctgcccggccgctccgtctgagaagtgaggaaaccctctgcctggcaaccgcccgtctgagaagtgaggagccctccgtctggcaaccaccccgtctgggaagtgaggagcgtctccgcccggcagccaccccgtccgggaaggacggtggggggatcagcccctgcctggccaggcgccccgtccggaggtgagggggcctctgcccggccgcccctactgggaagtgaggacccctctgcccggccagccgccccgtccgggagggaggtggggggggtcagccccccgcccggccagccgccccgtccgggagggaggtggggggatcagccccctgcctggccagccgccccgtccgggaggtgaggggcgcctctgcccggccgcccctactgggaagtgaggacccctctgcctggccagccgccccgtccgggagggaggtggggggaacagcccccgcccggccagccgccctatccaggaggtgaggggcgcctctgcccggccgcccctactgggaagtgaggagcccctctgcctggccagccgcccgtccgggagggcggtgggggggtcagccccccgcccggccagccgccccatctgggaggtgaggggcacttctgccgggccgcccctactgggaagtgaggagcccctctgc

SEQ ID NO: 10136 - DNA, 139 bp, Homo sapiens
tcccccaaggtattttccctattgttagcctttgtaccctaggtacaaatataggtattttccctattgtgttatgtacctgaaatgaatacacccttcccccaaggtattttccctattgttagcctttgtaccctag

SEQ ID NO: 10137 - DNA, 94 bp, Homo sapiens
gagagggtagctcctctctgcagctggtagtcctgacatctctgcaggtctctgaagctctcagcagagagggtagctcctcactgcagctggt

SEQ ID NO: 10138 - DNA, 87 bp, Homo sapiens
aaatgcaagcactctccagaatctgcatgtacaaaatctacaaaatctacagccctctctacaaaatgcaagcactctccaaaatct

SEQ ID NO: 10139 - DNA, 145 bp, Homo sapiens
gattattcaggccccctcccttccctaaacatcaagctcaaagatttgcccctgcccaaggctggcaaatttgctattctactacttctcaatgattattcaggccccctcccttccctacacatcaagctcaaagatttgcccc

SEQ ID NO: 10140 - DNA, 91 bp, Homo sapiens
gaagtcaacattctgaagatgacttcggagaatgaagatgacttcggagatgacttcagaatgaagaagagtcaacattctgaagatgact

SEQ ID NO: 10141 - DNA, 83 bp, Homo sapiens
tttaagactcaaagctctcgatttgatacctcattgtatggtatcaaaatagtcacaggtttaagactcaaagctcttgattt

SEQ ID NO: 10142 - DNA, 79 bp, Gallus gallus
caacccaggccattctgtgattctatatgattctgtgattttgaggtcccttccaacccaagccattctgtgattctat

SEQ ID NO: 10143 - DNA, 103 bp, Gallus gallus
gttggcaaagacctctctaagaccatcccctgggttctggttggacttgccaaactacgtccctaaatagatttgtgccagttggcaaagacctctctaagac

SEQ ID NO: 10144 - DNA, 74 bp, Gallus gallus
aaggtcccttccaacccaatcattccatagttctatagttctaggacattcaaggtcccttccaacccaaccat

SEQ ID NO: 10145 - DNA, 100 bp, Gallus gallus
agaatcattaaggttggagaagacctccaagatccccaaacccaacccaccctcaccatgagcctaagtagaattgtagaatcattaaggttggaaaaga

SEQ ID NO: 10146 - DNA, 87 bp, Gallus gallus
ttttttcttcatataagaatataatatataagaatataagaaatgtaagaatataagaatatattttttcttcatataagaataaaa

SEQ ID NO: 10147 - DNA, 89 bp, Gallus gallus
aaaaatgaaaataaaaccttcttatttgatatataaaaaataaaaatatataaaaaatatataaaaaataaaaataaaaccttcttatt

SEQ ID NO: 10148 - DNA, 94 bp, Gallus gallus
tagaaaagataggaaatagaagcaaggagtacgaattagggtgatggggaaggaagaagggcagtagaaaagataggaaataggagcaaggagt

SEQ ID NO: 10149 - DNA, 93 bp, Gallus gallus
cagataaaccctggttggggcaggacttccagtgagcatatcagctattaaaactattgctgttataaccagataaaccctgtttggggcagg

SEQ ID NO: 10150 - DNA, 105 bp, Gallus gallus
ggaagttggacctgaaaactgctgaaaggaagcagaaatcagaggtgctgagagaaagcaaaacccaagggctgctgaaaggaagttggacccgaaaactgctga

SEQ ID NO: 10151 - DNA, 83 bp, Gallus gallus
gtgcctgaaaactgcttcttgggaaagtctgggaaggctctggtttcactctgcaagtgcctgaaaactgctccttgggaaag

SEQ ID NO: 10152 - DNA, 100 bp, Gallus gallus
tgtgtatggcaagagatgaaatttgtgcatgagggagactggttttatttagccttcaaataagaaaaaaaactgtgtatggcaagagatgaaacttgtg

SEQ ID NO: 10153 - DNA, 75 bp, Gallus gallus
ggcataaaagcctatacacattttctctcattttgtgtaactgacaatgtaaggcataaaagcccatacacattt

SEQ ID NO: 10154 - DNA, 79 bp, Gallus gallus
tagtgagggatctcatagcagaaaaccttgcgtccatcagcatgtaggactttcgtagtgagggatctgatagcagaaa

SEQ ID NO: 10155 - DNA, 79 bp, Gallus gallus
acatttgatgtttaaacagtcctataagcacaacttaatttgtgttttgtgacgacatttgatgtttaaacagtcctat

SEQ ID NO: 10156 - DNA, 223 bp, Gallus gallus
acaattgtcttttttttttctttttctttctttctttttttttccatgtaaagcaaacacaattattgtagaaaataggttttctttctttctttctttctttctttctttctttctttctttctttctttctttctttctttctttctttctttctttctttctttctttctttctttctttctctctttctttcttcctttctttctttctttctttcttt

SEQ ID NO: 10157 - DNA, 123 bp, Gallus gallus
ctgttttcccctctatcttttgcgctactgtttgcatgtattggtttataaaactgttctgaaagggactgatggatgatttcagtgtgtctgttttcccctctatcttttgtgctactgttt

SEQ ID NO: 10158 - DNA, 119 bp, Gallus gallus
aggatgttaaagcccttgaaagaacccagagaaggctaattcctaccgtgaacactgtgcagttctgggttctactatataaaaaggatgttaaagcccttgaaagaacccagagaagg

SEQ ID NO: 10159 - DNA, 89 bp, Gallus gallus
ctgcatcctctgctctttctttacagtttctccaaaagataggcaacagagctgagctgtctctgcatcctctgctctttcttcacagt

SEQ ID NO: 10160 - DNA, 74 bp, Gallus gallus
atgccaccttctcactctgctactccaatcttgatttgcaaaacacttttcatgccaccatctcactctgctac

SEQ ID NO: 10161 - DNA, 88 bp, Gallus gallus
ggaaaaccaggaactgcagttccttcttcccagagccagaagccatgtgggaaacaaagcattccggaaaaccaggaactgtagttcc

SEQ ID NO: 10162 - DNA, 135 bp, Gallus gallus
ctccacattgtggtgaaggatcagatggcagagaacccctcaagtctgtcatggtgagagataagcctctaccttgctgtgagagatcagcctccacattgcggtgaaggatcagatggcagagaacccctcaag

SEQ ID NO: 10163 - DNA, 103 bp, Gallus gallus
tataaggaagcttgtttccttgtttttgtatacaaaaacaagcttgtataggaaggaagcacagcttccttcctataaggaagcttgtattccttgtttttgt

SEQ ID NO: 10164 - DNA, 73 bp, Gallus gallus
tggacccaagggcaggcagctgtaccgaacactcttttcctccagcatatggatccaagggcaggcagctgta

SEQ ID NO: 10165 - DNA, 92 bp, Gallus gallus
agtttagccccatttctgggcaaaaagaacttttattttattttttatttttctggaggagtttagccccatttctgggcaaaaagaacttt

SEQ ID NO: 10166 - DNA, 131 bp, Meleagris gallopavo
cagacacgttctttccgcggtctccgctgccacctcgtggccacagcgcaaaactgctgctgtctgccgccgagtctcgcttttaagctgccagacacgttctttccgcggtctctgctgccacctcgtgg

SEQ ID NO: 10167 - DNA, 95 bp, Meleagris gallopavo
ccattggcggtgcgcatgcgcagggtggataggcgtccattggctgcgcgcatgcgcaggatggacaggccgccattggcggtgcgcacgcgcag

SEQ ID NO: 10168 - DNA, 117 bp, Meleagris gallopavo
gtaatgaaagttgtgcacggtagggctaacaacacaggtgatggttcatatccccttttggtttattttggatccttgcctgccagatgtaatgaaagttgtgcaaggtagggctaa

SEQ ID NO: 10169 - DNA, 102 bp, Meleagris gallopavo
ggggaagaaagtgcgtgaagcgactctgaaaatagcacgcagcgctcaaaataagaacgacgtttgggaacgggggggaaaaagtgcgtgaagcgactctga

SEQ ID NO: 10170 - DNA, 104 bp, Meleagris gallopavo
atcctcatcccttaaccatcctcatcccttaaccacccccatccctatccccatcctcatctccatctccatccctatcctcatcccttaaccatccccatccc

SEQ ID NO: 10171 - DNA, 104 bp, Meleagris gallopavo
ctgccacagtcattgcaatcgttagtattagataagggtggtaaattaagggtgtgtatggggttgggaaaaacctgccacagtcattgcaatcgttagtatta

SEQ ID NO: 10172 - DNA, 641 bp, Drosophila melanogaster
atttttaaaggatgggcaaacgaaattatttagttttaaaaggtgggcaatcgaaattatttagttttaagagtgggcaaacgaaaaaaacaaattttaaagggtgggcaaacgaaataatttatttttaaagggtgggcaaacgttaaaaatgaattttaaaggatgggcaaacgaaattatttacttttaaaaggtgggcaatcgaaattatttagttttaagagtgggcaaacgaaaaaaacaaattttaaagggtgggcaaacgaaataatttatttttaaagggtgggcaaacgttaaaaatgaattttgaaggatgggcaaacgaaattatttagttttaaatggtgggcaaacgttttttttggaaatttttattttaaagaggtgggctaacgaaattgggtgtattttaaatgtgggcaatcgaaaaaaaatttttgttaaaggttttttaaagggtgggcaaacgataaaaactaataataatggttgggcaaaccttttttgttgataatatttggttttaagagatgggcaaacgatttactctctgattagaccgaggtaaacttaaaagccttatattttctaaagtataaattttttcaaaattctaaagggtgggcaaacgtggg

SEQ ID NO: 10173 - DNA, 620 bp, Drosophila melanogaster
gaaaaagccaaggagaaggagctgaagctaaaggagaaagaaagggaagccaagcttcaggagaaagagaaagaagaaaagcttaaacttaaggaaagagaagagagccttaggatggaacgagaggaaaaacttaaggaagagaagatcaaggagaaggaacgagaggagaagttgaaagaagaaaagatcaaggagaagcaaagagaggaaaaactaaaggaggagaagctcaaggagaaggaacgagaagaaaggatgaaggaaaaagagcgcgaagagaaggctaaggagaagcaacgagaagaaaagctaagagaggaaaagatcaaggagaaggagagagaggaaaaactcaaggagaagctaagggaagagaaaatcaaggagaaggaaaaagaagaaaagctccgaaaagagcgtgaagaaaaaatgagggaaaaggaacgagaagagaaaatcaaagagaaggagcgagttgaaaagatcaaggagaaggaacgagaagaaaaactaaagaaagaaaaggaagaaaagctcaaggagaaggaagagctgctcaagaaaaaggagaaggaggaaaaggagagagaagaaaagctcaaggaaaaggaaaggca

SEQ ID NO: 10174 - DNA, 362 bp, Drosophila melanogaster
gctccctcggtgagctactccgcaccagccgtgcagcagacctacgccgctccagccatccagcagtcgtatgtcgcccccagcaacgagtacctgcctcctgtgcagacctactccgcaccggccgtccagaggacctactccgcaccagctgtccagaggacctactccgccccctctgttagctactcggcaccctctgtgagctactcggctccatcggtcagctactccgctcctgctgtccagcagtcgtactccgctccatcggtcagctactccgcccctgctgtccagcagtcgtactccgctccatcggtcagctactccgcccctgctgtccagcagtcgtactccgctcc

SEQ ID NO: 10175 - DNA, 452 bp, Drosophila melanogaster
cagcagacctactccgttccagctcctgctcccgcggtccagcagagctactccgctccggctcccgctccagtggttcagcaaacatactccgcaccagcaccagttgtacaggaacagacctacaccgctgccgctcctgtgcaggccgtgcagcagctgacttattcagctcccgctccagtgacccaggaacaatactacagcgctccggcttctgtggttcagcagacttcctccgctcctgctcctgctccagcaccagttcaggaacaattctatagtgctcctgccccagccattcagcagacttactctgctccagctcctgctcctgtcgttcagcagacctactccgcccctgctccggcaccgcagcagacttactccgctccagctccagcagtccaggagcaaactcaggtggttcagagctacagtgctccggctcc

SEQ ID NO: 10176 - DNA, 249 bp, Drosophila melanogaster
gttaacaatttcatcttctgataattttgatttactgacattcttttgttgattaactatttcatctcttaacgatattggaccagtttctttatgctgttgattaacgattttattttctaacgatttcggactaatagttgcatttttaaacgattttggactaacaatttcattctctaacgatttggggctaacaatttcattttctaacgattgtgaactaacaatttcattctctaacgattt

SEQ ID NO: 10177 - DNA, 221 bp, Drosophila melanogaster
ggcgaactcaggatttgtggatcctaaactatttgatttaaaaatgacggaattaacatcgtcggcttgttcaggatttttcgatcccaaactgatatattgtttattagcggataaatctacgctggcgtgctcaggattttcagatcccgaactattagttttattaatgacggataattcaacgtcggcgtgttcaggattttcagatcccgaactat

SEQ ID NO: 10178 - DNA, 105 bp, Drosophila melanogaster
attctgtctccgtacctccaccagcaaagttaaaaaggcaaaataaattgtggatgcggaacagaattcattctgtctccgtacctccaccagcaaagttaaaaa

SEQ ID NO: 10179 - DNA, 126 bp, Drosophila melanogaster
tctccgtacctccaccagcaaagttaaatctccgtacctccaccagcaaagttaaaaaaaataaattgtggatgcggaacagaatttattctgtctccgtacctccaccagcaaagttaaaaaaaa

SEQ ID NO: 10180 - DNA, 117 bp, Drosophila melanogaster
tctgtctccgtacttccaccagcaaagttaaaaaaaaacctccaccagcaaagtttaaaaaaaaaaaaaaaaagttaaaactctgtctccgtacctccaccagcaaagttaaaaaaa

SEQ ID NO: 10181 - DNA, 118 bp, Drosophila melanogaster
aaagatggctacttttaatgtggccattaaatccacgaaaagttttatgtattaaaatcagtttaattactccacaaagaatatgaaagatggctactttaaatgtggccattaaatc

SEQ ID NO: 10182 - DNA, 92 bp, Drosophila melanogaster
gccaagataaaatcggaatgcaaagctaaacacgctttagctagtgtggaaaaatctgcagttgaagccaagataaaatcggaatacaaagc

SEQ ID NO: 10183 - DNA, 110 bp, Drosophila melanogaster
gaagctgagaagtctaaggaagaatcacctttaatgtctaaggaagcttccagaccagcatccgttgcaggaagtgttaaggatgaagctgagaagtccaaggaagaatc

SEQ ID NO: 10184 - DNA, 78 bp, Drosophila melanogaster
aacaaactactgaaaagtaatgattataccttagctatgattaatactaggtggtaataaactactgaaaagtaatga

SEQ ID NO: 10185 - DNA, 95 bp, Drosophila melanogaster
agtcttctttttcaccccattggtcaagccccctgcggcacgatcggtgcggatgaatcgtgaaaaggtcgtagtcttctttttcatcccattgg

SEQ ID NO: 10186 - DNA, 95 bp, Drosophila melanogaster
cctggcggcggtcctggtggcatcctgatgcccatgcgcggtattggtcccaggccatgcggtgccctgggtcctggcggcggtccaggtggcat

SEQ ID NO: 10187 - DNA, 86 bp, Drosophila melanogaster
gaagatattaataaagattataggctagtaaagcaaaggtttaaaacaattaggacttccaacgaagatattaacaaagattatag

SEQ ID NO: 10188 - DNA, 72 bp, Drosophila melanogaster
tccatcggagcaccccttccagcgattttattgcgcattaaatttcggctccagcggagcaccccttccagc

SEQ ID NO: 10189 - DNA, 72 bp, Drosophila melanogaster
gcccaccatcatgccgcccaccatttgctggcagccaatggcatggttccacaccccctggccgcccatccc

SEQ ID NO: 10190 - DNA, 84 bp, Drosophila melanogaster
agtcaaattggacagtttcatttaaactcaggtgagctgcagtgcactggaaacaaatgtagtcaaattgaacagtttcattta

SEQ ID NO: 10191 - DNA, 106 bp, Drosophila melanogaster
tagaatatagttcatgaaacatttataaatcgtcctcaaataatacacaataataatgactatgcgagtatagaatatagttgatgaaacatttataaatcgtcct

SEQ ID NO: 10192 - DNA, 288 bp, Drosophila melanogaster
cactacgcccagcaccagcagcagcaccagcaacaacagcagcagcagcaacagcagcagcagcagcgcttgatgcagggacactatcaatttggaccggatggcggaatgccaggattcagcgagcgcggagtgcccgaaggagcggccgccgtatcgcacagcgattgcaatgccatggtgtcgccaacttcagcagcagcagcggtacaacaacagcagcagcagatacagcagcagcagcaacagcagcagcagcagatacagcagcagcaacaacagcagcag

SEQ ID NO: 10193 - DNA, 101 bp, Drosophila melanogaster
gagaagctaaaagagaaagagagggctgaaaagcttaaagacctggaaaaagaagtaaagctaaaggaaaaggaggaacagctcaaggagaaggaaaagga

SEQ ID NO: 10194 - DNA, 78 bp, Drosophila melanogaster
gacgatgagagcggcagcgaggagggcagcggtggctccttggacgaggacagcgacgatgagagcggcggcgaggag

SEQ ID NO: 10195 - DNA, 87 bp, Drosophila melanogaster
attgatttgaattgaaacacagccacactaacaacacagacaccgcagatcatttgaattcgcaattgatttgaactgaaacacagc

SEQ ID NO: 10196 - DNA, 93 bp, Drosophila melanogaster
acatttccaattggcggcagaaagcgatgcaaaagaaaacgaagtaaatattgaacaggaattgctgtacatttccaagtggcggcagaaagc

SEQ ID NO: 10197 - DNA, 94 bp, Drosophila melanogaster
gaattatcctatttaacgatcaatttatatttataaggtagagaattaaccttttttttaattgtcttatagaattatcctatttaacgatcaa

SEQ ID NO: 10198 - DNA, 152 bp, Drosophila melanogaster
tatatgtacatacatccaatcagcattaagaaatcataacattgcagggaattgggaatgttgttctaatcagatcgagttcataaatactatacatacatatgtatatgtacatacatccaatcagcattaagaaatcacaacattgcagg

SEQ ID NO: 10199 - DNA, 118 bp, Drosophila melanogaster
caatagccgccgctgtcactgctaccgtcgctgcctctgctaccgccgctgccattgctaccgccgctgcctctgctactgtcgctgcctctgctaccgctgctgcctctgctgccgc

SEQ ID NO: 10200 - DNA, 131 bp, Drosophila melanogaster
gctgtgacctactccgctcctgctcctgccccagctgtgacctactctgctccagctccggtggtgcgcgttcaggccgctccagctgtgacctactccgctcctgctcctgctccagctgtgacctactc

SEQ ID NO: 10201 - DNA, 145 bp, Drosophila melanogaster
attaatgcgattgatttaattgttaaaattaaacgattaatgcgattgatttaattgttaaaattaaacgattaatgcaattgatttaattgttaaaattcgtatttttatctctacaagtgagattgatatatcagttgaaata

SEQ ID NO: 10202 - DNA, 100 bp, Drosophila melanogaster
tccacctcttccttttcgcaggccccattccgttcagcgaactctcgcccgatctaagcgtccggcgataggaatccacctcttccttttcgcaggtccc

SEQ ID NO: 10203 - DNA, 147 bp, Drosophila melanogaster
gagaaaggcaaaaactgaaactaaagtaatactatttgtaatttacaacaacaaaaatagatgtgtatccgaaagattgtcgaacaatgagctgtacactgggagaagggcaaaaactgaaactaaagtaatactatttgtaattta

SEQ ID NO: 10204 - DNA, 221 bp, Drosophila melanogaster
atagttcgggatctgaaaatcctgaacacgccgacgttgaattatccgtcattaataaaactaatagttcgggatctgaaaatcctgagcacgccagcgtagatttatccgctaataaacaatatatcagtttgggatcgaaaaatcctgaacaagccgacgatgttaattccgtcatttttaaatcaaatagtttaggatccacaaatcctgagttcgcc

SEQ ID NO: 10205 - DNA, 113 bp, Drosophila melanogaster
taaaagatatgggctagtgtaacccaatgataactatctttctccattcaggagttaccatctaaaaacacaatttttgtcaatttaaaagatatgggctagtgtaatccaat

SEQ ID NO: 10206 - DNA, 103 bp, Drosophila melanogaster
agagtgggcgtggacaaaaagttttcgggatatagaaatggacaaaacaactgatttaatcaaaaaaatttaatcattagagtgggcgtggcaaaaagttttt

SEQ ID NO: 10207 - DNA, 125 bp, Drosophila melanogaster
atcaatttagtgacgcatatgatattgtccctatcatataattaatataaagaattttatcaagagtagccaaacacctcgtcatcaatttagtgacgcatatgatattgtccctatcgtataat

SEQ ID NO: 10208 - DNA, 125 bp, Drosophila melanogaster; identical to SEQ ID NO: 10207

SEQ ID NO: 10209 - DNA, 125 bp, Drosophila melanogaster; identical to SEQ ID NO: 10207

SEQ ID NO: 10210 - DNA, 125 bp, Drosophila melanogaster; identical to SEQ ID NO: 10207

SEQ ID NO: 10211 - DNA, 125 bp, Drosophila melanogaster; identical to SEQ ID NO: 10207

SEQ ID NO: 10212 - DNA, 134 bp, Drosophila melanogaster
atcaatttagtgacgcatatgatattgtccctatcatataattaatatagagaattgaaagaattttatcaagagtagccaaacacctcgtcatcaatttagtgacgcatatgatattgtccctatcgtataat

SEQ ID NO: 10213 - DNA, 85 bp, Drosophila melanogaster
taaactttagtaaactttggttatacgccttttccgcctcggcacttgagacacaggcgatttaaactttggtaaactttggtta

SEQ ID NO: 10214 - DNA, 128 bp, Drosophila melanogaster
tttaaagaattttatcaagagtagccaaacacctcgtcatcaatttagtgacgcatatgatattgtccctttcgtataatcaatataataactttaaagaattttatcaagagtagccaaacacctcg

SEQ ID NO: 10215 - DNA, 91 bp, Monodelphis domestica
caggcctggagtcaagaagatatgaattcagggggaagctgggtatctactgatagagagccaggcctagagtcaagaagatatgaattca

SEQ ID NO: 10216 - DNA, 127 bp, Monodelphis domestica
ctgttggcctcagtttcctcatctgtaaaatgagctggaaaaggaaatggcaaacaatctgtatgactctgggcaagtcatgtcttcaccctgttggcctcagttttcctcatctgtaaaatgagct

SEQ ID NO: 10217 - DNA, 84 bp, Monodelphis domestica
ctaaagcagtcttaagtacgggtgtaatcgaggtcttcccatagcaaggagttttctcccctaaagcagtcttaagtaggggtg

SEQ ID NO: 10218 - DNA, 104 bp, Monodelphis domestica
agagaaccttccagttgatatccaaaggaaactcatgttcataatgtccaccccctccccacattctggccccaaagaagagaacctttcagttgatatccaaa

SEQ ID NO: 10219 - DNA, 93 bp, Monodelphis domestica
atatatatatattaatttaaggtcgccaatgtgatagtgaaatcacttttaaagatggatatatatatatatatattaatttaaggtcgccaa

SEQ ID NO: 10220 - DNA, 118 bp, Monodelphis domestica
tttgccatttccttctccagctcattttacagatgaggaaatcgaggcaacagggtgaagtgacttgcccagggtcacacagctagtttgccattatccttctccagctcattttaca

SEQ ID NO: 10221 - DNA, 90 bp, Monodelphis domestica
tttaatcaccaaaagtgtaaacaccatacttaaaagttgagtatggagatctgcccatttttttatttaattaccaaaagtgtaaacacc

SEQ ID NO: 10222 - DNA, 103 bp, Monodelphis domestica
tctcctggcctctggggtagggaatctaaggttctttttctccctccctccctccctctcttccctctctctgtctcctggcctctggggcagggaatctaag

SEQ ID NO: 10223 - DNA, 90 bp, Monodelphis domestica
atttttagatttaatcaccaaaagtataaacaccctacttaaaagttgagtatggagatctgccaatttttagatataatcaccaaaagt

SEQ ID NO: 10224 - DNA, 98 bp, Monodelphis domestica
agagggcagggaagctcaagctccaacatccctcccccacagactgctggacttaaatccaatcaaagctttagagggcagggaagctcaagctccaa

SEQ ID NO: 10225 - DNA, 96 bp, Monodelphis domestica
tgctacagcccttcctaaatcctgttaccctgagtagggtagagattggaataattaaattttgatctatgctgcagcccttcctaaatcctgtta

SEQ ID NO: 10226 - DNA, 113 bp, Monodelphis domestica
aaatgaggagaggggtggcctggtgaccttggacaagtctcttccccctccttgggcctcagtttcctcattaccaaatgaggagggggtggcctggtgaccttggacaagtc

SEQ ID NO: 10227 - DNA, 131 bp, Monodelphis domestica
gatttaacattctatgttctagacactatagctcttttcagctctgataatctatgctctagaaggattccttcttgctctgacattctatgttctaagatccctcccgctttgacattgtgtgttctaag

SEQ ID NO: 10228 - DNA, 97 bp, Monodelphis domestica
tcctctgaggggactctgtccctctggaggctcttgagagaggccctttgaaagagtctctggctggaacttcctctgaggagactctgtccctctg

SEQ ID NO: 10229 - DNA, 93 bp, Monodelphis domestica
tggaatcattatcctatcccaggtgccatatctacaattcttggaaccattatcttacttcaattcctggaatcattatcctaccccaggtgc

SEQ ID NO: 10230 - DNA, 87 bp, Monodelphis domestica
cctgattgtaacaatgaagatacttagctcttcctttattgtgaagattaaattgtaatcccctgattgtaacaatgaaggtactta

SEQ ID NO: 10231 - DNA, 81 bp, Monodelphis domestica
aagaaggaaaggagggagagagagacagagagagacagagagagagacagagagagacagagagagacagagacagagaga

SEQ ID NO: 10232 - DNA, 110 bp, Monodelphis domestica
ataattaggtaagtacaaatgtacaatgtctataattataataaaagaatgattgtgataggaagtaatagcataattgataggataattaggtaatgtacaaatgtaca

SEQ ID NO: 10233 - DNA, 154 bp, Monodelphis domestica
ctgggttccaatctggcctcagatacttcccagctgggtgaccctggccaagtcacttgaccccccattgccttgccctgaccactcttctcttctgccttggaattctgggttccaatctggcctcagacacttcccagctgggtgaccctgg

SEQ ID NO: 10234 - DNA, 84 bp, Monodelphis domestica
cctaaagcagtcttaagtatgggtagagtaggggtcctcccatagcaaggagttttctcccctaaagcagtcttaagtatggtt

SEQ ID NO: 10235 - DNA, 114 bp, Monodelphis domestica
ctcaagtttatagtgttaaactgtgtttataagtttatagtgttaaactaaaaaagtttaagtttatatataagtatataaaaaagtataagtttatagtgttaaactaaaaaa

SEQ ID NO: 10236 - DNA, 89 bp, Monodelphis domestica
aatgtaatataaataattataatgtattataacactgttaatgaataatttgttggagcagaatagaatgtaatataaagaattataat

SEQ ID NO: 10237 - DNA, 96 bp, Monodelphis domestica
tgctacagcccttcctaaatcctgttaccctgagtagggtggagattggaataattaaattttgatctatgctgcagcccttcctaaatcctgtta

SEQ ID NO: 10238 - DNA, 93 bp, Monodelphis domestica
taacaggatttaggaagggctgcaacatagatcaaaatttaattattccaatctctaccctactcagggtaacaggatttaggaagggctgta

SEQ ID NO: 10239 - DNA, 105 bp, Monodelphis domestica
tcaaactccaacacccctcccccacagactgctggacattaatccaatgaaagcttccagaggacagggaagttcaagctccaacacccctcccccacagactgc

SEQ ID NO: 10240 - DNA, 110 bp, Monodelphis domestica
tttcagaagaccctgctctctaaagggggaggggtctctctgggctctgagggctcctgatgggattaggttcagctggttctttcagaagaccctgctctctaagaggg

SEQ ID NO: 10241 - DNA, 110 bp, Monodelphis domestica
gtttgccatttccttctccagctcatttgacaaatgagagaaccaaggcaactagggtgaagtgcttgcccaaactcacacagttttccatttccttctccagctcattt

SEQ ID NO: 10242 - DNA, 112 bp, Monodelphis domestica
tttttctcctagatccctgcagattgttcagggacattacaccgccactacacagtttgtcctctgcttatggatagtatttttctcctagatccccgcagattgttcaggg

SEQ ID NO: 10243 - DNA, 75 bp, Monodelphis domestica
attttttagatttaatcaccaaaagtacttacagtagtggggagatctacccattttttagatttactcaccaaa

SEQ ID NO: 10244 - DNA, 97 bp, Monodelphis domestica
tctgtgtgggaggggtgttggagtttgagctttcctgtcctctggaggctttttattggattaaagtccagcactctgtgggggaggggtgttggag

SEQ ID NO: 10245 - DNA, 98 bp, Monodelphis domestica
catacagggagggagggagggagggagggaatggagaaaaggagggggagaaagagagagagagagagagagagagagagagagagagagagagagag

SEQ ID NO: 10246 - DNA, 91 bp, Monodelphis domestica
tgtcagaaccgtaaatatgccaaatcctagcaggaaggcctaatgagctggtcagccttgagaaacttgtcagaaccataaatatgccaaa

SEQ ID NO: 10247 - DNA, 139 bp, Monodelphis domestica
gttttccatttccatctcaagctcattttacagatgaggaaactgaggcaaatgaggttagttttcttggcaaagctactggagtggttttccatttccatctcaagctcattttacagatgaggaaactaaggcaaat

SEQ ID NO: 10248 - DNA, 94 bp, Monodelphis domestica
aatcaagaatagaaagcagtacttttagtcagaggagagtaggggtcctgatatacttctaggtcaccaatcaagaatagaaagaagtactttt

SEQ ID NO: 10249 - DNA, 94 bp, Monodelphis domestica
gattgtaacaatgaagatacttagctcttcctttgttgtgaagattaaattgtaatccccagattgtaacaatgaaggtacttagctcttcctt

SEQ ID NO: 10250 - DNA, 104 bp, Monodelphis domestica
ggggtattgaccacatgggtggatggtaggaagggagagacaagagggaaaggagaatgggtaattttcccttagactaaggggtattgaccacatgggtagat

SEQ ID NO: 10251 - DNA, 102 bp, Monodelphis domestica
gtgttggagtttgagcttccctgtcctctggaggcttttgattggattaaattaacatccagcagtctgtgagggaggggtgttggagtttgggcttccctg

SEQ ID NO: 10252 - DNA, 143 bp, Oryza sativa
tagaacagtgcttggcacatagtaagtgcttaacaagtatcattattattattattagggacgcgtgtcacacctgatcaactttcatctacccgagctctagaacagtgcttggcacatagtaagtgctttacaagtatcat

SEQ ID NO: 10253 - DNA, 114 bp, Oryza sativa
tgatgtcattaccatcccacagcctgtgtttttttttttaatccaaaaagatacaatgaagaaactacatttctatgcaatcagtattgatgtcattaccatcccaagcctgtt

SEQ ID NO: 10254 - DNA, 107 bp, Oryza sativa
tttttttttttaagattagagaagtataattttataggctacaaatatatcctgtttttggacatggtgatgtgcaatggattttttttttttaagattagggaagt

SEQ ID NO: 10255 - DNA, 89 bp, Oryza sativa
gaatgtgtgcaagatgccattggtaagacagaagatgagggttagggaaatctgggcaggagggggaatgtgtgcaagatgccaatggt

SEQ ID NO: 10256 - DNA, 90 bp, Oryza sativa
ggactctccgtggcagcagtcgctattataccccattcccggcagatgaggagcatactgggagcaggactctccgtggcagcagtcact

SEQ ID NO: 10257 - DNA, 91 bp, Oryza sativa
catcaaaacaagtaaacaggcatcaatagcatcaatataaataaatggaattattatatatatatacacatcagaacaagtaaacaggcat

SEQ ID NO: 10258 - DNA, 96 bp, Oryza sativa
cggtgctctgcgcgcagtaagcgcttaacgaatgccaacattgctattattcgcctcccagcgcttagtgcggtgctctgcgcgcagtaagcgctt

SEQ ID NO: 10259 - DNA, 97 bp, Oryza sativa
tgcccgtggggctggaagccaggagcttcgccacgggtgtgtgacgcataaatggattcctcccaagtgggaagtgctcgtggggctggaagccagg

SEQ ID NO: 10260 - DNA, 114 bp, Oryza sativa
tgtgcagaacactgtactaagcgcttgggagagtaggctacaacaataaattcgttcattcaatagcatttattgagcgctcactatgtgcagagcactgtactaagcgcttgg

SEQ ID NO: 10261 - DNA, 90 bp, Oryza sativa
cctggggtggttgtaccgtggggtggctgtaacctggggtaaggtatcaaacaatactggttgtatccccggggtggttgtatcgtgggg

SEQ ID NO: 10262 - DNA, 96 bp, Oryza sativa
acatcaaaacaagtaaacaggcatcaatagcatcaatataaatagaattattgatatatatatatatatataaacatcaaaacaagtaaacaggca

SEQ ID NO: 10263 - DNA, 106 bp, Oryza sativa
gggggccacaaaagtactttaaaaaagatctgcaacaagtataaagcacacataaaaggaaaaagtattgaaatttggtgaggggggacacaaaagtactttaaaa

SEQ ID NO: 10264 - DNA, 97 bp, Oryza sativa
gcttagaacagtgcttggcacatagtaagcgcttaaataccaacattattattaccccagtgcttagtacagtgcttggcacatagtaagcgcttaa

SEQ ID NO: 10265 - DNA, 97 bp, Oryza sativa
ctaagctaagttgtgggcagggattgtgtctaaactaagtctaaactaaatttagtctaaactaagctaagctagttgtgggcagggattgtgtcta

SEQ ID NO: 10266 - DNA, 83 bp, Oryza sativa
aataaaatgaaaaaaggaaaacaacacctccccaaccccccaaaaaaagcaaaaacaagaaataaaatgaaaaaaggaaacca

SEQ ID NO: 10267 - DNA, 84 bp, Oryza sativa
cttaatacagtgctctgcacatacctgtaattcactttgatatgtctccctctttagactctttaatacagtgctctgcacata

SEQ ID NO: 10268 - DNA, 92 bp, Oryza sativa
catattatcttcacgtaaaaaggaactgcactcaacatccggacacatcgaatccaccacagttcaaaacatattatgttcacgtaaaaagg

SEQ ID NO: 10269 - DNA, 100 bp, Oryza sativa
ttatccttattcatatatttcactgatattcacatatttcacatatatatttcacatatatatatgaaatatatatttcatccttattcatatatttcac

SEQ ID NO: 10270 - DNA, 107 bp, Oryza sativa
gctctttccactgagccacgctgcttctctaaagtggcagagcggggactcgaacccgtgacctctgactcccaagcccgggctccttccactgagccacgctgctt

SEQ ID NO: 10271 - DNA, 93 bp, Oryza sativa
ggggagggaatgtgtctgtttatttttatattaaatgttctccccccctctgactgtagctcaccgtgggggaggggaatgtgtctgtttatt

SEQ ID NO: 10272 - DNA, 100 bp, Oryza sativa
atttgttaagcgcttactatgtgccaagcactgttccaagtaaatagaaggtaatcaggtcataataatgttggtatttgttaagcgcttactatgtgcc

SEQ ID NO: 10273 - DNA, 95 bp, Oryza sativa
gtatttgttaagcacttactatgtatcaagcactgttctaagagctggcgttggtacaaataatgatgttggtatttgttaagcgcttactatgt

SEQ ID NO: 10274 - DNA, 109 bp, Oryza sativa
ggacaaactgatatttgctaataaaagctagttttctactctgtaatgaagataaaaaaaaaagttctcttttaacgacggtcgggacaaactgatatttgctagtaaa

SEQ ID NO: 10275 - DNA, 154 bp, Oryza sativa
gttcgaatcccagctctgccacttggcggcggtgtgactgtgggcaagtggagaagcagcgtggctcagtggaaagagcacggactttggagtcagggctcatgagttcgaatcccagctctgccacttggcggctgtgtgactgtgggcaagt

SEQ ID NO: 10276 - DNA, 105 bp, Oryza sativa
ggcaccctttactctttccgagtacagaattcccggtactgctcggaactgtggcccagtttggtggcaccctttactctttccgagtaaagaattcccggtact

SEQ ID NO: 10277 - DNA, 89 bp, Oryza sativa
ggggggaaggcctcctgggggagatgtggcgccagaccagggaaaagagggcttaaagggggggaaggcctcctgggggagatgtggcg

SEQ ID NO: 10278 - DNA, 115 bp, Oryza sativa
tctactcgaaactgcatcacttctccaatgatagtaatggggtggttttcgcctaaaataaacttctctttggaaatacactctacgcgaaactgcatcacttctccaatgatag

SEQ ID NO: 10279 - DNA, 146 bp, Oryza sativa
tggtatttgttaagcgcttactatgtgcaaagcactgttctaagcgctggggtagatacgaggtaatcaggttgtaataataataataatgttggtatttgttaagcgcttactatgtgcagagcactgttctaagcgctggggta

SEQ ID NO: 10280 - DNA, 105 bp, Oryza sativa
tcctaccactttaatgtcttactccaagcattagaacccattttatatcctgtttatagatttagatgtagaacttctttcctaccactttactgtcttactcca

SEQ ID NO: 10281 - DNA, 81 bp, Oryza sativa
tgatgcctgtttacttgttctgatgggtatacatctataattctatttattcataatgatgcctgtttacttgttttgatg

SEQ ID NO: 10282 - DNA, 99 bp, Oryza sativa
atatgtccataaaataatcctggaaaacttgggtatgtactagtaacagtccatcatatgtccatatgtccataacataatcctggaaaacttgggtat

SEQ ID NO: 10283 - DNA, 98 bp, Oryza sativa
agtaagtgcttaataaataccataattattcttttttattatattattataatattttgattatgcctggcatacagtaagtgcttaataaatactat

SEQ ID NO: 10284 - DNA, 101 bp, Oryza sativa
aatagactcatgtgatctagatgacagaaacaacaaaaggcaaaattgagggcccccttgcaagtattgaatagactcaagtgatctagatgacagaaaca

SEQ ID NO: 10285 - DNA, 77 bp, Oryza sativa
ataaatggaattatagatatgtacacatcaaaacaagtaaacaagaattaatataaatagaattatagatatgtaca

SEQ ID NO: 10286 - DNA, 91 bp, Oryza sativa
aagcgcttaacaaataccaacattattattattagtgcgtggattcagaacagtggtgtgcacataggaagcgctgaacaaataccaacat

SEQ ID NO: 10287 - DNA, 75 bp, Oryza sativa
gtaaacaggcatcaatataaatagaattatagatatatacaagtcaaaacaggtaaacaggcataaatataaata

SEQ ID NO: 10288 - DNA, 113 bp, Oryza sativa
ggtgttatcctctactcatctctctcaattcaactttagacagcaccaccaccctccctgtctcacaagcccataaccttggtgttatcctctactcatctctctcattcaat

SEQ ID NO: 10289 - DNA, 108 bp, Oryza sativa
agcactgttctaagcgctggggtagatacaacgtaaaaataataatgttggtatttgttaagtgcttactatgtgcagagcactgttctaagtgctggggtagataca

SEQ ID NO: 10290 - DNA, 112 bp, Oryza sativa
agcgcttactacgtgcagagcactgttctaagcgctggggtagatacaggggaatgatgttgtcattcattcaatagtatttattgagcgcttactatgtgcagagcactgt

SEQ ID NO: 10291 - DNA, 114 bp, Oryza sativa
tgtgccaagcactgttctaagcactggggtagatacaataataataataatgttggtatttgttaagcgcttactatgtgccaagcactgttctaagcactagggtagatacaa

SEQ ID NO: 10292 - DNA, 137 bp, Oryza sativa
tcctaaagacaattactctcctccccttcaaagccttattgctgccaacccctcgctcatgtccttcctctggcctggaatgccctccctcctgaaatcctaaagacaattactctcctccccttcaaagccttatt

SEQ ID NO: 10293 - DNA, 118 bp, Oryza sativa
gcacttagcacatagtaagctcttagtgaatgccataataataatgaaaacctcgtatttaccctacatgcaatgctttgcacagtggcacttagcacatagtaagcacttagtgaat

SEQ ID NO: 10294 - DNA, 105 bp, Oryza sativa
gcttagtacagtgcctggaacataataagtgctgaacaaataccatggaaaaggtcctgattatcttgtacctactccagtgcttagtacagtgcctggcacata

SEQ ID NO: 10295 - DNA, 82 bp, Oryza sativa
tagtacagtgctctgcacatagtaagcactcaataaatactattgaatgaatgaatagtacagtgctctgcacacagtaagc

SEQ ID NO: 10296 - DNA, 94 bp, Oryza sativa
tatgtgtcaggcactgtactaagcactgggatagataataacaataataattgtatttaataagcacttactatgtgtcaggcattgtactaag

SEQ ID NO: 10297 - DNA, 86 bp, Oryza sativa
tgcttagtacaatgctctgcacatagtaagcactcaataaatactattgaatgaatgaatgaatgcttagtacagtgctctgcaca

SEQ ID NO: 10298 - DNA, 86 bp, Oryza sativa
gtgagataagtatggaggaggagggggatggtggtggattcagagtccgtgaagccaaggtgagataaggtatggaggaggagggg

SEQ ID NO: 10299 - DNA, 103 bp, Oryza sativa
atggcatttgttaagtgcttactgtgtgacagtactcggtgctggggtagacacaagcttatcaggttatcatcatcattatggtatttgttaagtgcttact

SEQ ID NO: 10300 - DNA, 96 bp, Oryza sativa
atcaatctgtgtgcagagcattgtgcagagtttgctcccttcccacacccctgaaaccatccaatcgatcaatctgtgtgcagagctttgtgcaga

SEQ ID NO: 10301 - DNA, 105 bp, Oryza sativa
agcactgttctaagcgctgggatagacgcaataataataataataatgttggtatttgttaagcgcttactaggtgcagagcactgttctaagcgctggggtaga

SEQ ID NO: 10302 - DNA, 85 bp, Oryza sativa
gctcacagtcttaatccccatttaacggataaggtaatcacgttgtcccatgtgagctcacagtcttaatccctatttaacggat

SEQ ID NO: 10303 - DNA, 98 bp, Oryza sativa
gctgggattagaacccatgacctctgactcccaagcccgtgctctttccactaagccatctgcttcacataaacagccgggattagaacccatgacct

SEQ ID NO: 10304 - DNA, 98 bp, Oryza sativa
aactgtagtgctgtccaactttgtcccgtagctagaacaatctgaatgatcccctcaaagggaatcgcatcccagaactgtagtgctgtccaactttg

SEQ ID NO: 10305 - DNA, 98 bp, Oryza sativa
cttagaacagtgcttggcacatagtaagctcttaaataccaatattattattattatatctacccgagtgcttagaacagtgcttgacacatagtaag

SEQ ID NO: 10306 - DNA, 89 bp, Oryza sativa
atgcctgtttacttgctttgatgtgtatatatctataattctatttatttatattgttgctattgatgcctgtttacttgttttgatgt

SEQ ID NO: 10307 - DNA, 100 bp, Oryza sativa
ctggaaatctgccacactctttctttccctaaggattgtgggggggagcaggtccattacaagctggaaatctgccacactctttctttccctaaggatt

SEQ ID NO: 10308 - DNA, 84 bp, Oryza sativa
agcctaccattttctaaactctccagagaagactgccttcagtacatcccggaaagagagtagcctaccattttctaaactctc

SEQ ID NO: 10309 - DNA, 91 bp, Oryza sativa
cataatctgcagggtttcctatgaatccataatgatgagacccttaaatgtctctcatcataatctgctgggtttcctatgaatccataat

SEQ ID NO: 10310 - DNA, 78 bp, Oryza sativa
actaactaggtgtgctcgttttccagaaagctctcaataaatacgattgaccaactaactaggtgtgctcgttttcca

SEQ ID NO: 10311 - DNA, 85 bp, Oryza sativa
ttctctcccaaattcttaatatggggcagggattgtgtctatcacctctactgtatggttctctcccaaattcttaatacggggc

SEQ ID NO: 10312 - DNA, 116 bp, Oryza sativa
ccccccttcccgattttcccctcctctcattttcttcccttcccttcctctccttcgttggtcctttccctctgccccccttcccattttcccctcctctcattttcttcccttcc

SEQ ID NO: 10313 - DNA, 94 bp, Oryza sativa
aaggaccacatttttcattttaaagagaaaggttagggagggggctgctgagcaattcaggaaggaccacatttttcattttaaagagaaaggt

SEQ ID NO: 10314 - DNA, 95 bp, Oryza sativa
cagtccaccaggtgttttctcagctggagaaacgtgggaaatagggggcgcttggtctgaaacaagcctgcagtccaccaggtgttttctcagct

SEQ ID NO: 10315 - DNA, 104 bp, Oryza sativa
aatcaattacattttcaaaaatggccttcttcttctcacttgccttttagtaccaacttgaattatttaaaaaaagggagaatcaattacattttcaaaaaagg

SEQ ID NO: 10316 - DNA, 83 bp, Oryza sativa
cagtaagcgctcaataaatacaattgattgagcgatagtaccaggctctgcactcagtaagcgctcaataaataccattgatt

SEQ ID NO: 10317 - DNA, 114 bp, Oryza sativa
gctccactagtgactgctcttcccctcccggtcccgcgggcagggagcctatcaatacaccttggtgcgcgccccaggcccggcccgctccactagtgactgctctcccctccg

SEQ ID NO: 10318 - DNA, 113 bp, Oryza sativa
tggtatttgttaagcgtttactatgtgccaagcaatgttctaagcgctggggtagatacaatagtcataataataataataatggtggtatttgttaagcgcttactatgtgc

SEQ ID NO: 10319 - DNA, 112 bp, Oryza sativa
cccaacaatctaagcgctcggtggtatttactgagcgcttaccgtgtccggagcaccgtcctaagcgctcgggagagtaccgcccaacaatctaagagctcggtggtattta

SEQ ID NO: 10320 - DNA, 108 bp, Oryza sativa
gcttggagcagtgcttggcacataataagcgcttaacaaataccaatattattattattagtaataccttgtaactgccccagcgcttggaacagtgcttggcacata

SEQ ID NO: 10321 - DNA, 97 bp, Oryza sativa
gaaagagcccgggctttggagtcagagatcatgggttcgaattgggaaggagaagcagcgtggctcagtggaaagagcacgggctttggagtcagag

SEQ ID NO: 10322 - DNA, 85 bp, Oryza sativa
tagtacagtgctctgcacatagtaagtgctcaataaatactattgagtgaatgaatgaatatcgtactctcccaagcgcatagta

SEQ ID NO: 10323 - DNA, 78 bp, Oryza sativa
acatcaaaacaagtaaacaggcatctatataagtagaattatagatatatatacacatcaaaacaagtaaacaggcct

SEQ ID NO: 10324 - DNA, 128 bp, Oryza sativa
tactaagcacttgggagagtacaatacaacaataaacacacattcggcatatttattgaatgctcactgcgtgcagagcactatactaagcacttgggagagtacagtacaacaataaacacacattc

SEQ ID NO: 10325 - DNA, 94 bp, Oryza sativa
gggcacttacagttgttctctacttactcttactacttactctacttactcttactcttacacttactcgggcacttacagttgttctctatct

SEQ ID NO: 10326 - DNA, 141 bp, Oryza sativa
atataaatacacatatatatgtataggcatatgacaatgtgaaatgcctatacatatatatgtgtgtatatatacacacacacacacacacacacatatatatacacatatatatgtataggcatatgacaatgtgaaatg

SEQ ID NO: 10327 - DNA, 102 bp, Oryza sativa
cacatagtaagcgcttaacaaataccaacattattattaccctgtatctaccccagcggtgagaacagtgctgtgcacatagtaagcgcttaacagatacca

SEQ ID NO: 10328 - DNA, 104 bp, Oryza sativa
agtgcttactatgtacagagcactgtactaagcacttgggagagtacaatataataataataatgttggtatttgttaagtgcttactatgtgcagagcactgt

SEQ ID NO: 10329 - DNA, 96 bp, Oryza sativa
atattgataactgagaagattaaaaattgataaaaattgattgatagggtctgactatattgataactgcataatgataactgagaagattaaaaa

SEQ ID NO: 10330 - DNA, 101 bp, Oryza sativa
cttactatgtgcaaagcactgtactaagagcttgggacagtacattcattcatttaatagtatttattgagcacttactatgtgcagagcactgtactaag

SEQ ID NO: 10331 - DNA, 119 bp, Oryza sativa
tatagtatttattaagcgcttactgtgcacagagcactatgctatgtgttaggagagaataaacagatgggaatgagccattcattcattcaatagtatttattgagcgcttactatgt

SEQ ID NO: 10332 - DNA, 102 bp, Oryza sativa
aatggaatttgttaagcacttactatgtaccaggcactatctttagcactaggatggataataataacaataataatggtatttgttaagcacttactatgt

SEQ ID NO: 10333 - DNA, 82 bp, Oryza sativa
tggtatttgttaagcgcttaactatgttccaggcactaaataataataataatgttggtatttgttaagcgcttactatgtg

SEQ ID NO: 10334 - DNA, 127 bp, Oryza sativa
cttctctgtgcctcagttacctcatctgtaaaatgggggatgagctctgccacttgtctgctgtgtgaccttgggcaagtcacttcaccttctctgtggcctcagttacctcatctgtaaaatgggg

SEQ ID NO: 10335 - DNA, 101 bp, Oryza sativa
gagcctcatgtgggacaacctgattacccatctgggcctcagtttaatcatctggaaaatggggattaactagagcctcatgtgggacatcctgattaccc

SEQ ID NO: 10336 - DNA, 79 bp, Oryza sativa
ctataattctatttatttatattaatgcctgtttacttgcttaaatgtgtatatatctataattctatttatttatatt

SEQ ID NO: 10337 - DNA, 154 bp, Oryza sativa
ccatttggggctcacagtctaagttgaagggagaacaggtactgaataccatttcacagacgagggaactaaggcctcagtactgggtagatacaagattatcaagtccatttggggctcatagtctaagttgaagggagaacaggtactgaat

SEQ ID NO: 10338 - DNA, 100 bp, Oryza sativa
acttagattaccacctataattttatctatttatatcccactcccagccccacagcacttatgcacttacattaccacctataattttatctatttatat

SEQ ID NO: 10339 - DNA, 114 bp, Oryza sativa
actgtatatattttcgatacctatttattttgtatgattgtacatcgcctcgattcttatttcgttaccctatttattttgttaatgaattgtacatcgcctcgattctattta

SEQ ID NO: 10340 - DNA, 103 bp, Oryza sativa
tctgcacacagtaagtgctcaataaatacgattgaatgaaagactgctgtactcccccaagtgcttagtactgtgtgttctgcacacagtaagtactcaataa

SEQ ID NO: 10341 - DNA, 104 bp, Oryza sativa
gcacatagtaagcgcttaacaaataccagcattattattattattattattatctttgcagcaagaacagtgcttggcacatagtaagcacttaacaaatacca

SEQ ID NO: 10342 - DNA, 108 bp, Oryza sativa
ttagtacagtgctctgcacacagtaagcattcaataaataagactgaatgaacgagtcattattattagtctcccaagcatttagtacagtgctctgcacacagtaag

SEQ ID NO: 10343 - DNA, 105 bp, Oryza sativa
catctgtaaaatggggattaatacttgtctgctgcgtgaccttgggcaagtcacttaacttctccacgtctcagttactacatctgtaaaatggggattaagact

SEQ ID NO: 10344 - DNA, 89 bp, Oryza sativa
catgactggaggtaactgaaataaaccttcattatctcacatttctttctacttccttatatttcatgactggagataactgaaataaa

SEQ ID NO: 10345 - DNA, 153 bp, Oryza sativa
aaaatacttgtgtgtatgatcttaatacccccccacccgaaaaacacccacattgtcattttaattcagtaaataattgatgcgaaagcattttagagagataaaatacttgtgtgtatgatcttaatacccccccacccaaaaaacacccac

SEQ ID NO: 10346 - DNA, 76 bp, Oryza sativa
aaaggttaatcagggaaggcttccagggtggtatgaatagagtgggaaaatgaaaagttaatcagggaaggcttcc

SEQ ID NO: 10347 - DNA, 117 bp, Oryza sativa
gggaggcacctacttagacatcaaatccacttatgtgctactcgcactcggtgaggcggctagctcccaccctgttcacatccccctggggaggcacccacttagacatcaaatcca

SEQ ID NO: 10348 - DNA, 96 bp, Oryza sativa
agtaagcgcttaacaaataccaacattattatcattatccaccccagcgcttggtaccgtgcctcgcatacagtaagcgcttaacaaataccacag

SEQ ID NO: 10349 - DNA, 92 bp, Oryza sativa
tactcaaccctgggtgagcagttgtgtttggttcaagtatatatatatatatacatatatatatatactcaaccctgggtgagcaggtgtgt

SEQ ID NO: 10350 - DNA, 92 bp, Oryza sativa
tttatcatgaaatgtatatccacttctttcttcctttggggacttatgtaggaatgagactgctttaatttatcatgaaatgtatatccact

SEQ ID NO: 10351 - DNA, 240 bp, Sus scrofa
acactgtgggaaggaaggaaggaaggaaagagagggagggagaaaggaaaggaagaaagaaggaaagaaaggaaggaaggaaacagagtaagagagagagagaaagaaagaaagaaagaaagaaagaaagaaagaaagaaagaaagaaagaaagaaagaaagaaagaaagaaagaaagaaagaaagaaagagaaaggaaagaaagaagaggaagggaaggaagaagggaagaaagaagaa

SEQ ID NO: 10352 - DNA, 129 bp, Sus scrofa
tgtctcttaggaggacactgtccttggagggagggccccctcatccaggaggacctcatctcagacccttcccgtggcttctcctcttgtgtctcttaggaggaccctgtccttggagggagggccccc

SEQ ID NO: 10353 - DNA, 101 bp, Sus scrofa
agaggtatgtatataggtaggtaactagatagactatagataagataaacagacagacacacatagatgatagataatagaggtatgtagataggtaggta

SEQ ID NO: 10354 - DNA, 77 bp, Sus scrofa
tgagtagtattctattgaatacatgtaccacaacttcttaatccattcatccgtgagtagtattctattgaatatat

SEQ ID NO: 10355 - DNA, 79 bp, Sus scrofa
tatttccttgtatacatgcaccacatcattctttttatggctgaatagtatttatttacttgtatacatgcaccacatc

SEQ ID NO: 10356 - DNA, 96 bp, Sus scrofa
aaaaattggcacaacattgtaaacattggcacaacattgtaacattgtaacattgtaaacattgtaacattgtaaacattggcacaacattgtaaa

SEQ ID NO: 10357 - DNA, 83 bp, Sus scrofa
tatccatgaggatgtgggtttgacccctggcctcgctctgtgggttaaaaacccgactggtatccatgaggatgcgggtttga

SEQ ID NO: 10358 - DNA, 134 bp, Sus scrofa
taggatatttatttgaaaacttaccatgaaagaaaatgaacaaatgaataaataaatacttgagagaagtttatcgttggctgtttcaatgtccttgtaggatatttatgtgaaaacttaccatgaaagaaaat

SEQ ID NO: 10359 - DNA, 105 bp, Sus scrofa
tctgtaagtggcctacagagagagcaatttgacatttgaccacatacccaccagttcagagctttctgttaagtggtctgtaagtggcctgcagagagagcaatt

SEQ ID NO: 10360 - DNA, 96 bp, Sus scrofa
ataaattttggtttaaataatatacaatccctatagatatatgtatatgtatgtgtgcatatatgttctacacataaactttggtttaaataatat

SEQ ID NO: 10361 - DNA, 106 bp, Sus scrofa
ataataaatacgtcagtctagggtgattctttaagggctcttgaattcctgacgtacaggaaacgtgtgcgataataaatacgtcagtccagggtgattctttaag

SEQ ID NO: 10362 - DNA, 79 bp, Sus scrofa
ctgtaccaacagtggtttgaatttttcagagatgagctgctgtatgaagagggatgctggaccaacagtggtttgaatt

SEQ ID NO: 10363 - DNA, 99 bp, Sus scrofa
taaagtgtaatgaaaagaatacagacatgcatgcatgcacagggagctatgttcaatatcctgtgataaagtgcaatgaaaagaatacagacatgcatg

SEQ ID NO: 10364 - DNA, 87 bp, Sus scrofa
aaaccatactcattagataacttgattagattagattagataactagattagattagagttgaaaccatactcattagataacttga

SEQ ID NO: 10365 - DNA, 78 bp, Sus scrofa
tcagaatcagacgtcccccgtgtccattcccccaggtgcagcctcgtccttgttcagaatcagacgtcccccgtgtcc

SEQ ID NO: 10366 - DNA, 84 bp, Sus scrofa
aaaaatatacttccccacctattttaaaactggcacctaaaatatacgtatatttaaaaaatatacttccccacttattttaaa

SEQ ID NO: 10367 - DNA, 111 bp, Sus scrofa
tctctagttgcatccatgttgctgcaaatggatagtaaatggtatttgtctttctctttctgacttcattagtatgagggtctctagttccatccatgttgctgcaaatgg

SEQ ID NO: 10368 - DNA, 80 bp, Sus scrofa
cttagttatataaaaatatttttcaagtgaacaggtctggcattttatatcaaatgcttagttatataaaaatatttttc

SEQ ID NO: 10369 - DNA, 163 bp, Sus scrofa
ggtgggtcagggcggggcagagggggagggggcggggcgggagggcggggctgagcacatgggcggggtggagggaggggcggagggaaggggcggggccagaggggacccgtaggagccgagggggatgaggcgggggagggcaggggcggggccagagggg

SEQ ID NO: 10370 - DNA, 117 bp, Sus scrofa
gaagcattctcctatttgtccacagagagggcatcataagcccagtgaacaacgaaagcagcttccagtattggatctgcagtggaagcattctcctatttgtccacaggagggcag

SEQ ID NO: 10371 - DNA, 122 bp, Sus scrofa
ctatgtgtccacaggagggcagcataagcccagggaagaccaagaacagcttccagtcttgggtccgcaatggtagcattctcctatttgtccacaggagggcagcataagcccagggaaga

SEQ ID NO: 10372 - DNA, 122 bp, Sus scrofa; identical to SEQ ID NO: 10371

SEQ ID NO: 10373 - DNA, 88 bp, Sus scrofa
acttgtgtattaaatgcacaaacatttattctggaagttccacagtcaccttgagactctcttacttgtgtattaaatgcacaaacat

SEQ ID NO: 10374 - DNA, 104 bp, Sus scrofa
ctactaaccccaaaccccccgtccatcccactctcattgcttatctattctgaaagccagaatttgcacctactaaccccaaaccctccgtccatcccactctc

SEQ ID NO: 10375 - DNA, 87 bp, Sus scrofa
caggaactttcatatgctccaggtgtggcctttcatatgctcaactttcatatgctccaggaactttcatatgctgcaggtgtggcc

SEQ ID NO: 10376 - DNA, 87 bp, Sus scrofa; identical to SEQ ID NO: 10375

SEQ ID NO: 10377 - DNA, 98 bp, Sus scrofa
aatgaacttatttataaaacagaagcagactcacaaacatagaacacaaacttacggttaccaaagggaatacaaatgaactcatttataaaacagaa

SEQ ID NO: 10378 - DNA, 106 bp, Sus scrofa
cctaggaataagggagttttatactcaagatactcccaactgtggtttccattaatattcagtttcactaagtaggtacctaggaaataagggagttttatactca

SEQ ID NO: 10379 - DNA, 108 bp, Sus scrofa
taatcttaatcatctttgaattagaatcattttacagtattattaaatattccttttctctctaaaatcagtgttgctggataatcttaattatctttgaattagaat

SEQ ID NO: 10380 - DNA, 91 bp, Sus scrofa
accaagagaagtgttctgcattcagatggattgcattctcttggttctgctttcagtgtctccaggaccaagagaagggttctgcattcag

SEQ ID NO: 10381 - DNA, 83 bp, Sus scrofa
tgcataaatcaaaactaggatcaattaactttcctttcccactgtggaagaaggactgctgcataaatcaaaactaggatcaa

SEQ ID NO: 10382 - DNA, 98 bp, Sus scrofa
atatagtataactgaatcactttgctgtacacctgagtcttggaaaagaacctgaaaaattgaaaaaaaaatatatagtataactgaatctctttgct

SEQ ID NO: 10383 - DNA, 124 bp, Sus scrofa
agtgttctgtccatttctactgtacagcagtgtgtgtgtgtgtatacacacattcgttttctcacattatttttttccagtatagtggatttagtgttctgtccatttctactgtacagcagtg

SEQ ID NO: 10384 - DNA, 136 bp, Sus scrofa
acaaaccaaataaaaaaataataataataaaatcaaggttggagggactttaaccagtcaatctgcccgacgacctacaaggatacaaaccaaattaaaaaaataataataataaaatcaaggttggagggacttt

SEQ ID NO: 10385 - DNA, 82 bp, Sus scrofa
ttgtcttgtttctaacttgttataatatataaattatatattacaatttgtgtttgtgttgtcttgtttctaacttgttata

SEQ ID NO: 10386 - DNA, 85 bp, Sus scrofa
cccattttacaggtgggaaaattgaaattagagaatgtcagccacggccgcggtctcccattttacaggtgggaaaaattgaaat

SEQ ID NO: 10387 - DNA, 102 bp, Sus scrofa
agaataaacaggacccccaatcttatataataatcttacataataaagaataataaacaatgatcatacataataaagaatgaaacaggacccccaatctta

SEQ ID NO: 10388 - DNA, 133 bp, Sus scrofa
aacattccactatatatatatatatacacacatacacttaatcatttgactatatatatatatatataaaacattccactatatatgtatatatatgtgtgtgtgtgtgtatatatatatatatatatatata

SEQ ID NO: 10389 - DNA, 75 bp, Sus scrofa
atttcttgggccgctcccgcggcattattgttgttgttgttgttgttgccatttcttgggccgctcccgtggcat

SEQ ID NO: 10390 - DNA, 75 bp, Sus scrofa; identical to SEQ ID NO: 10389

SEQ ID NO: 10391 - DNA, 78 bp, Sus scrofa
taaaacatagtgaaaaaaatgaaaaaaaagacaaaaaaaaaaaataaaaaaaaaataaaacatagtgaaaaaaatgaa

SEQ ID NO: 10392 - DNA, 82 bp, Sus scrofa
caggagggttcccttttctccacagtggctgtaccagtttacattcccaccagcagtgcaggagggttcccttttctccaca

SEQ ID NO: 10393 - DNA, 82 bp, Sus scrofa
tgtggagaaaagggaaccctcctgcactgctggtgggaatgtaaactggtacagccactgtggagaaaaggtaaccctcctg

SEQ ID NO: 10394 - DNA, 104 bp, Sus scrofa
aactttccttaacaaagacacatgcactcacataatcatgcaatcccactcttgggcgtatatccagacaaaactttccttaaaaaagacacatgcactcacat

SEQ ID NO: 10395 - DNA, 96 bp, Sus scrofa
atagtacaactaaaaaataactgtaactgttattagaaaataactgttattaagactgttaataacttttaataactgttattaaaaaataactgt

SEQ ID NO: 10396 - DNA, 164 bp, Sus scrofa
taacaactattcggctaatcagatacccagtcatgttttaatagatttttctgggagattttaagtataaaattctggctatattcaagagaattttatagtaatttatataacaactattcggctaatcagatacccagtcatgttttaatagatttttctgg

SEQ ID NO: 10397 - DNA, 85 bp, Sus scrofa
aaaaatggactagttgaatcagtatttcaggccatatttcgttaaaactgagtttaaaaatagactagttgaatcagtatttcag

SEQ ID NO: 10398 - DNA, 96 bp, Sus scrofa
taaattgtactcactaagtttagttaagatagagatctttaaacatgatgtattgtacctaattgcccctaaattgtacccactaagtttagttaa

SEQ ID NO: 10399 - DNA, 96 bp, Sus scrofa
ttaactaaacttagtgggtacaatttaggggcaattaggtacaatacatcatgtttaaagatctctatcttaactaaacttagtgagtacaattta

SEQ ID NO: 10400 - DNA, 103 bp, Sus scrofa
atttgagagtaatggagagggatatatacacagacacacacacacatatatatacacacataggggtgtgtgtgtaatttgagagtaatggagagggtatata

SEQ ID NO: 10401 - DNA, 89 bp, Sus scrofa
tacaaaggatcctaagagactactacaagcaactatacaaatacaaaatacaaaaaaattacaaagtatcctaagagactactacaagc

SEQ ID NO: 10402 - DNA, 102 bp, Sus scrofa
aaaggagacagaaaacatatccaagagatataccaaaatgactcgcttttatggggcagaggagagagagagaaaggagacagaaaacatattccaagagat

SEQ ID NO: 10403 - DNA, 96 bp, Sus scrofa
tgtggaagctttttggtttgatgtagtctaatgtattggtctcgtcctttatctgaggtcttgctgtgggagctttttggtttgatgtagtctaat

SEQ ID NO: 10404 - DNA, 78 bp, Sus scrofa
tttttaatattttcaagccatcttccatattatgccttgtataatggtcccttatttttaatattttcaagccatttg

SEQ ID NO: 10405 - DNA, 139 bp, Sus scrofa
cctttgataaccataaatttgttttctatgtctgtgagtctatttctagttgaaataagtgcttggccgtcggttttcatctatcgtttcctttgataccataaatttgttttctatgtctgtgagtctatttctagtt

SEQ ID NO: 10406 - DNA, 124 bp, Sus scrofa
cactgggaactatgtctaaacacttttgatggagcatgtaatgtgagaaaatcccattgtgaggatacatgagatcctgctgtgtacactgggaactatgtctaaccacttttgatggagcatg

SEQ ID NO: 10407 - DNA, 100 bp, Sus scrofa
gtatacagaaatacaactgatttctgaatgttataaaagttttttatattcctttcctaatattccatcattagtatacagaaatacaactgatttctga

SEQ ID NO: 10408 - DNA, 96 bp, Sus scrofa
ttaactaaacttagtgggtacaatttaggagcagttaggtacaatacatcatgttttaagatctctatcttaactaaacttagtgagtacaattta

SEQ ID NO: 10409 - DNA, 96 bp, Sus scrofa
taaattgtactcactaagtttagttaagatagagatcttaaaacatgatgtattgtacctaactgctcctaaattgtacccactaagtttagttaa

SEQ ID NO: 10410 - DNA, 189 bp, Sus scrofa
ttcagattatatgattttctatgtacagtttccaagaaaataaagaaaaaatgtacacttagatcgttcagattatatgatttctctatgtacagtttccaagaaaataaatttgtagtgtttttgaacaaataattttttgaacaaataattttttgaagaaatttgtagtgtttttgaacaaataat

SEQ ID NO: 10411 - DNA, 92 bp, Sus scrofa
ttgctgtgagctgtggcgtaggccagtggctataggtcacagatgtggcttggatctggcattgctgtggctgtggcgtaggccagtggcta

SEQ ID NO: 10412 - DNA, 74 bp, Sus scrofa
tttgaaattcattttgtctgttactgttggatgttagtattgtttcagcatttgaaattcactttgtctgttac

SEQ ID NO: 10413 - DNA, 89 bp, Sus scrofa
aaacacttttgctgcatctcacaagggatgagtgtgtaagcatttgttgctgtaaaatttcctctcaaacacttttgctacatctcaca

SEQ ID NO: 10414 - DNA, 92 bp, Sus scrofa
ctaccaaccaccagctgtgtggcctcagcctcgcactctgcctgttttgaaacgaggctctaccaaccaccagctgtgtggcctcagcctcg

SEQ ID NO: 10415 - DNA, 128 bp, Sus scrofa
cacggcagagaaacacatgcctggagcccgaaagatagttcctcccggggtcctttggcccaggagccggcgcctggatcaggcacggcagagaacacatgcctggagcccgaaagatagttcctccc

SEQ ID NO: 10416 - DNA, 106 bp, Sus scrofa
ccccggccatgatgactaagcaaagtccagccaactgcccctttaggggaaaatgtcccaacaaaaaggtagaaaggtgaggccccagccatgatgactaagcaaa

SEQ ID NO: 10417 - DNA, 87 bp, Sus scrofa
agctgaagaaagaagaaggattgcggatgcgtgaggcttgtctggttagcagagctacagacaagctgaagaaagaagaaggattgc

SEQ ID NO: 10418 - DNA, 94 bp, Sus scrofa
gtctgtagctctgctaaccagacaagcctcacgcatccgcaatccttcttctttcttcagctggtctgtagctctgctaaccagacaagcctca

SEQ ID NO: 10419 - DNA, 146 bp, Sus scrofa
ttttaaatatcctctttgatttcgtcagtgacccactggtgtttagtagttgacgatgatttgagtgtataactttgtcgtcatttgcctctaggaattttaaatatcctctttgatttcgtcagtgacccctggtgtttagtagc

SEQ ID NO: 10420 - DNA, 92 bp, Sus scrofa
gtgcccagcccccacccaggcatcccccggccctttcccggggactaacctctggagccgaggattcggtgcccagcccccacccaggcgtc

SEQ ID NO: 10421 - DNA, 105 bp, Sus scrofa; identical to SEQ ID NO: 10359

SEQ ID NO: 10422 - DNA, 84 bp, Callithrix jacchus
atttatttgttattaacaaataactaatagtcgtttatttattaacaaataattaataatcatttatttgttattaataaataa

SEQ ID NO: 10423 - DNA, 103 bp, Callithrix jacchus
ctgttacccaggctggagcacagtggcacaatcaaactcttgcactgtttaacttttttagagaggggggtctggctctgttacccaggctggagcacagtgg

SEQ ID NO: 10424 - DNA, 142 bp, Callithrix jacchus
tgaggccggaataagaaacaatagaagaatgtttcaagttagttcagtcaagaggtggaccaaggtcggttacagagtccaatggccttgtcaatgaggccggaaataagaaacaatagaagaatgtttcaagttagttcag

SEQ ID NO: 10425 - DNA, 112 bp, Callithrix jacchus
ctgtgctgattcaaagcatcctcctatagcaatcactgggagctgccagcaggtggctgcagaccctgtcagctctgttgctgctgtgctgactcaaagcatcctcctatag

SEQ ID NO: 10426 - DNA, 130 bp, Callithrix jacchus
tttttagatgtgtgtgtgtatgtatgtgtgtgtgtgtgtgtgtgtgtgtgtgtgtgtgtataagatatactcagcacatttttcaaatctagacagggtaacagcaataagcttgactctgtgtgtgtgt

SEQ ID NO: 10427 - DNA, 100 bp, Callithrix jacchus
agccattcaattcttttaaccagtaaccaattaccaattgacatctaaacattcaatgttacagggaaaagccattcaattcttttaaacagtaaccaat

SEQ ID NO: 10428 - DNA, 95 bp, Callithrix jacchus
atgctaccacggatcatcagcctcaactcaaaccatgtattgctctgttgcccaggctagagtacagcaatgctaccacggatcatccagcctca

SEQ ID NO: 10429 - DNA, 91 bp, Callithrix jacchus
aaattgacattctgtagagaatcccattttcattccaaattttttctgggtctgaagagattagcaaattgacattctgtagggaatccca

SEQ ID NO: 10430 - DNA, 65 bp, Callithrix jacchus
atataccaaggaatatatttccttggaaatacaccatggaatataccaaggaatatataccaagg

SEQ ID NO: 10431 - DNA, 907 bp, Callithrix jacchus
tacaatgtaatgatttatctatatactgtattgaatattatgcatagatgactattacactatatatgggtgtaataactataataaatatagtgtaatgacttacacatatagtgtgacaactataatatatatagtgtaatgacatgtatagtgtaatagctattatgtatgcatgatgtaatgagtattatatatagtatgatgactatatatatagtctaattatcataaatatacataatgtaatgactattatatagagtatgacattatatattccgtattgactgccttacatatatagtgtaatggctataatatatatataatgtaatggctgtaatatatagtgtaataactattttaaatgtatagtgtaatgactattatatatagttattgactattatatatggctattacactatatagtataagattaccaatatatagtgtaatgactataatatatatagtacaatgaccataaaacatgtatgtatacatagtgtcaagactattatatatagtgtaatgactactgtatatgtaatagtgtaatagctattttatgtattcataatatactgtattattggccagttagccctgttggttagagcatggtgctaatacactgtattaaaatgtatcattacatttttatatataatagtgaattgacttaaattgaaaagacaggtaatctaatagtgtacaatggtgtgtgtgtatataatatatatacatatatataaaaagtatgactataatatgtatatagtgtaatgactaatacacatattacagtgtaaagactataaaatatatacatatagtgtaaagactattacatatgtaatagtatgatgattactatatatggtaatggctattatatata

SEQ ID NO: 10432 - DNA, 142 bp, Callithrix jacchus
tttgcatattttagaaataatcaagtcacactcataccttcaatttcaagcctttcctataaagatcttatttatatatttgcataatatacatatatttgcatattttagaaataatcaattcacactcataccttcaatt

SEQ ID NO: 10433 - DNA, 101 bp, Callithrix jacchus
acctcaagtagctgtataatgtgtaatttaaaaacatattttatttataaattttaaaaattacctcttagtaataacctcaagtagctgtataatgtata

SEQ ID NO: 10434 - DNA, 87 bp, Callithrix jacchus
tcagcagtgggcgtgtatctcagttggggcgggttgcctcggcaacggctggctgcctcagcagtgggcgtgtatatcagttggggc

SEQ ID NO: 10435 - DNA, 129 bp, Callithrix jacchus
ataattacatatagaaaaatgtatcgcttcatacacaaataattacatatagaaatattgtaattatgtagaaatatgtaattttttgtgtctatgaagctatacataattacatatagaaatatttag

SEQ ID NO: 10436 - DNA, 124 bp, Callithrix jacchus
aaaaaaaaaccaaaataatgctaacctgtctttttttcagacaggtatatgtacacattttcaaggattaggaattttaggtttagaaaaaaaaaaacaaaataatgctaacctgtcttttttt

SEQ ID NO: 10437 - DNA, 124 bp, Callithrix jacchus
ggatcacttgagtccaggaggtcaaggctactgtgacataggattgcactagagcactccagagctgcttgggaggctgaggcaggagggatcacttgagtccaggaggtcaaggctactgtga

SEQ ID NO: 10438 - DNA, 85 bp, Callithrix jacchus
cctggtggaggtgagggctgagggcatatctaggcctctccctgcaggaagagctcctccccctggtggaggtgaggactgaggg

SEQ ID NO: 10439 - DNA, 120 bp, Callithrix jacchus
atgtttccactcgtaaaaatatacatttgtcaccaacctcttggggcagtattttaaattattgcagaatgtatcatatttttatgcaccatgtttccattcgtaaaaatatacatttgt

SEQ ID NO: 10440 - DNA, 95 bp, Callithrix jacchus
catatgaggaatatatgtagatatgtgatgtattcatatagatatagatatatgaatatatatctatacatatgaggaatatatgtagatatgtg

SEQ ID NO: 10441 - DNA, 82 bp, Callithrix jacchus
actgagatacacgcccattgctgacgcagccagccgttgctgaggcaacctgtccctactgagatacacgcccactgctgac

SEQ ID NO: 10442 - DNA, 80 bp, Callithrix jacchus
ttcaaaatataaaatctccagcctaggaaacttagtgagatcctgtctctattttcaaaatataaaatctcaagcctagg

SEQ ID NO: 10443 - DNA, 95 bp, Callithrix jacchus
caggaggtctttgctcccttctaaacccctcagaggagtttcacctctggatgatctgtttgacggtcatcaggtggtctttgctcccttctaaa

SEQ ID NO: 10444 - DNA, 132 bp, Callithrix jacchus
gtgctgtactgggagagtgccatctacagtgtgcaggccatctgcccagtgccccatctccctgatgatggggcgtacatttaacagtaattttggtgctgtactgagagagtgccatctacagtgtgcagg

SEQ ID NO: 10445 - DNA, 78 bp, Callithrix jacchus
gcagaactccagaaagggctaggtggggatattgtttgccgagatcatctagtgggcagaattccagaaagggctagg

SEQ ID NO: 10446 - DNA, 111 bp, Callithrix jacchus
tgcaaagcacatgctgtttccaaaatgggagcatctgatttgggttttgcttttgtattattggacccagagaatcgtattttgcaaagcacatgctgtttccaaaatggg

SEQ ID NO: 10447 - DNA, 103 bp, Callithrix jacchus
tccagagttggattctatttttttaattagaaaaaaagaaaaacccaaattttcgattttgttatttttttccaatccaatccagagttggattctatttttt

SEQ ID NO: 10448 - DNA, 73 bp, Callithrix jacchus
tcatcctggcctctactcactacgtgatgggtattggggatggttgccatcatccctggcctctactcactac

SEQ ID NO: 10449 - DNA, 99 bp, Callithrix jacchus
cacaattaacaaaccttaacttattgaatatattatattgtatacagcaaggaaatagaagactttgacaacacaattaacaaaccttaactaattgaa

SEQ ID NO: 10450 - DNA, 82 bp, Callithrix jacchus
ttttgctctccatttgcttggtaaatcttcctccaaccctttaatatccttgcttttgttttgctctccattttcttggtaa

SEQ ID NO: 10451 - DNA, 133 bp, Callithrix jacchus
gaggttaaaatggaggagaggtgtccataattaaaagttagaaaccttagagaagaaactaaaactaccatgcttagtaattctaaccatgtatgaggttaaaatggaggagaggtgtccataatttaaaagt

SEQ ID NO: 10452 - DNA, 103 bp, Callithrix jacchus
tgctgctccggacagcctctaagtctctgccagcgcactcccctcccagctgaggcaatacgcggcgctcctgcttgctggctccggacagcctctaagtctc

SEQ ID NO: 10453 - DNA, 91 bp, Callithrix jacchus
ttctctaggaagtctaagataaagtcatctgaaaataagtacttccctgagaacttcttgcttctctaggaattctaagataaagtcatct

SEQ ID NO: 10454 - DNA, 82 bp, Callithrix jacchus
actggtttagttttctggactggaggaaaactaaagaggagcctagcaagaaaagtaagattggtttagttttctggactgg

SEQ ID NO: 10455 - DNA, 93 bp, Callithrix jacchus
ttgtcagccacagctctcctgtatgagatgattctttggacatacagagatcagggagctacttgtcagccagagctctcctgtatgagatga

SEQ ID NO: 10456 - DNA, 88 bp, Callithrix jacchus
tgggtgctggagtcctaggagttcagtaattcacagtataatctccttactgtagtggaggcctctgggtgctggagtcctaagagtt

SEQ ID NO: 10457 - DNA, 95 bp, Callithrix jacchus
ggccaggatggtcttgaactctgacctcgtgatctgcccaccttggcctcccaaagtgctgggattacaggcggccaggatggtcttgaactccg

SEQ ID NO: 10458 - DNA, 94 bp, Callithrix jacchus
gttgttttattataaaagtaattaaatctcattatagaaaaatgaagaaaataaaaaaattagaaaaggttgttttattataaaaagtaattaa

SEQ ID NO: 10459 - DNA, 136 bp, Callithrix jacchus
gcaattctcctgcctcagcctcctgagtagctgggattacaggcatggcacgatctcagctcactgcaacctccacctcctgggttcaagcaattctcctgcctcagcctcctgagtagctgggaatacaggcatg

SEQ ID NO: 10460 - DNA, 123 bp, Callithrix jacchus
gagagaggtaagaagcttcatatgtgtcttagaatcagacaaaaaacatgacccaaggaaattcccgtggataattgagaggaggtaagaagcttcatatgtgtcttagaatcagacaaaaaa

SEQ ID NO: 10461 - DNA, 117 bp, Callithrix jacchus
aaaagagagggtctggaattgtgcccacatgtatatgaaaaagataaaaagatacattaaaatatgaaaggagatgaaagatacaggaaaagagagggcctggaattgtgcccacat

SEQ ID NO: 10462 - DNA, 84 bp, Callithrix jacchus
agactccgaggccatgtgcagggaactgcagcgtaggaagagggatcagcacgtgcagagactccgaggccgtgtgcagggaac

SEQ ID NO: 10463 - DNA, 94 bp, Callithrix jacchus
ggaggcgggagtctctgggtctcgggggctctcagtgcttcggggccggcggcctagaagaggctggaggcgggagtctctgggtctagggggc

SEQ ID NO: 10464 - DNA, 110 bp, Callithrix jacchus
gtccccacctctttccctctcctttcctctctggaagcccatatattatttctccccgtcccccactctctccttccagtccctacctctttccctctcctttcctctct

SEQ ID NO: 10465 - DNA, 107 bp, Callithrix jacchus
tttcggctaattatactggagagtctgaaaataaacaagcaaataggaacaatgtgaaatattgcaattgaattctttcggctaattatactggagagtctgaaaat

SEQ ID NO: 10466 - DNA, 90 bp, Callithrix jacchus
attattttccactatccttgatcaggatttctctctctttcttttaaagctgtaggcagtatcttattattttcaactatccttgatcag

SEQ ID NO: 10467 - DNA, 88 bp, Callithrix jacchus
actgagatacacgcccactgctgacgcagccagctgttgccaaggcaacccgtccctactgagatacacgcccactgctgacgcagcc

SEQ ID NO: 10468 - DNA, 89 bp, Callithrix jacchus
agagaaagatagaaaatccttatgttacctgtaaaagagcagaatataaaattgaaagaaagagaaagaaagaaaatccttatgttacc

SEQ ID NO: 10469 - DNA, 81 bp, Callithrix jacchus
ccaccatgcccagctaatttttgcagcctcccgagtagctgggactacaggtgcacaccaccatggcccagctaatttttg

SEQ ID NO: 10470 - DNA, 84 bp, Callithrix jacchus
acggggccttagggcgccggagggaaccgaaactgttgggggcgaccgccctcccgccaacggggcctaagggcgccggaggga

SEQ ID NO: 10471 - DNA, 81 bp, Callithrix jacchus
cagtgggcgtgtatctcagtagggacgggttgcctcggcaacggctggctgcgccagcagtgggcgtgtatctcagttggg

SEQ ID NO: 10472 - DNA, 105 bp, Callithrix jacchus
cccccatcgggcatccctctctctcctctggcttcagtccctgttctgcctctggtcccctctccaaactcagagctgcccccccatcggacatccctctctctc

SEQ ID NO: 10473 - DNA, 98 bp, Callithrix jacchus
aaaaaagcatgggttctgaggtcagactaccctgtcctgaaccaggaaggcagttttgcctatcagaaaaagagcatgggttctgaggtcagactacc

SEQ ID NO: 10474 - DNA, 139 bp, Callithrix jacchus
tcaacatggtgaaacccgtctctactaaaaatacaaaaaattagctgggggcgggtggctcacgaggtcaagagaatcgagaccatcctggtcaacatggtgaaacccgtctctactaaaaatacaaaaaattagctgg

SEQ ID NO: 10475 - DNA, 126 bp, Callithrix jacchus
catctgacactaaaatatttaaatgctgtccagttattgcaatccttgatttgtaaatggaggattcgaggacttttttttttcaaatattttcatctgacactaaaatatttaaacgctgtccag

SEQ ID NO: 10476 - DNA, 100 bp, Callithrix jacchus
ttttaaatttattttagagacagggtcttgctttgttaattaaataaaataaatttaaatttattttaaatttattatagagacagggtcttgctttgtt

SEQ ID NO: 10477 - DNA, 106 bp, Callithrix jacchus
tcctggcacaccataaatattcttcaatgtatgaatgaataaatgagtatcccagcattttgcatagctcctggcacaccataaatattcttcaatgtatgaatga

SEQ ID NO: 10478 - DNA, 92 bp, Callithrix jacchus
ctatagtttaatttgggggaaccaaaattatattctatacatctaacctacagaaattgcattagatctataggttaatttgggggaaccaa

SEQ ID NO: 10479 - DNA, 82 bp, Callithrix jacchus
atcatccatgttaatcttccatctcagattcttaatgacatctacaaagtccttttatcatccatgttaatcttcccatctc

SEQ ID NO: 10480 - DNA, 78 bp, Callithrix jacchus
aagtctctaggaagtgccaaactttcccacatcttcctatcttctgagcctccaagtctctaggaagttccaaacttt

SEQ ID NO: 10481 - DNA, 124 bp, Callithrix jacchus
agttctggttaattgatatattaactttccaaatttgtaatttcatgatgattctgaattgctctaaatttgcttgaaaaacagttctggttaattgatatattaactttcaaatttgtaattg

SEQ ID NO: 10482 - DNA, 98 bp, Callithrix jacchus
tcatttagaaaacaacatgttaaaaccactggaaaaaggaagggccatttagtaaattgccctcatttagaaaacaacatgttaaaaccactggaaaa

SEQ ID NO: 10483 - DNA, 87 bp, Callithrix jacchus
ggcgacagagcgagactctatctcaattactcacttgtcaatcaataaataaatagaacagtggcgacagagcgagactctgtctca

SEQ ID NO: 10484 - DNA, 97 bp, Callithrix jacchus
gtggatttgccagagcctggcaaatgtaagaagacttagtagtatagtgagaatggctatatatgagtacagacgtggatttgccagagcctgggaa

SEQ ID NO: 10485 - DNA, 89 bp, Callithrix jacchus
gttaaagtacaaggacatagaatgtactatgtgtctgagcatgtctcgcacaaatatcttggttaaagtacaaggacatagaatgtact

SEQ ID NO: 10486 - DNA, 81 bp, Callithrix jacchus
attataatgacttttcaacaagtttccatttggaaaacaatttaacttctaagattatagtgacttttcaacaagtttcca

SEQ ID NO: 10487 - DNA, 103 bp, Callithrix jacchus
aacagataagaacaaaagaattttgtcatatgcactcctagaaaatgagtctgtctcttaattatacatacttcactttaatagataagaacaaaagaatttt

SEQ ID NO: 10488 - DNA, 133 bp, Callithrix jacchus
taagaaattgtttgaaataagactataagagtctaactggggttacaggtgtgagccaccgcacctggccttgttgtttatttctaataatttaagtaagaaattgtttgaaataagactataagagtgtaac

SEQ ID NO: 10489 - DNA, 114 bp, Callithrix jacchus
cagccaaactgagcttcataagcgaagaaaaaataaacatccttaaagaaaaagaactttcaccaagaatttcctgtcagccaaactgagcttcataagcgaagaaaaaataaa

SEQ ID NO: 10490 - DNA, 75 bp, Callithrix jacchus
tatagcaatggagaatgaactaaaacaaattacccagtctcaggtatttctctatagcaatggagaatgaactaa

SEQ ID NO: 10491 - DNA, 126 bp, Callithrix jacchus
ttgtgatctattgtctcaattcactgaagggtaagaaaggaaaaaaaagatgcatcagagctacagagcagtgtttctctcttgtgatctatgtctcaattcactgaagggtaagaaaggaaaaaa

SEQ ID NO: 10492 - DNA, 71 bp, Callithrix jacchus
gccatttatttatttataaagtaacatattcacttcatccatttcaatgccatttatttatttataaagtg

SEQ ID NO: 10493 - DNA, 87 bp, Callithrix jacchus
caaaagatgcatttaattaactcagcttatctttttttgcccatgatcttgatcctaaatttccaaaagatgaatttaattaactca

SEQ ID NO: 10494 - DNA, 94 bp, Callithrix jacchus
aaatacaggaaacacagacatataagtggctaaaaagaatatggcttctcacatttgtgccactcttctgaaatacaggaaacacagacatata

SEQ ID NO: 10495 - DNA, 100 bp, Callithrix jacchus
ctttatttgcctctgtaccctacccatgggacatgccccctttcaacctgtttgcctctgtacctttatttgcctctgtaccctacccatgggacatgcc

SEQ ID NO: 10496 - DNA, 101 bp, Callithrix jacchus
ctttcagtctaagctattttaataaattgtcagctgaagaatctccccaggagggctgcattgttagagtttctctttcagtctaagctatttaataaatg

SEQ ID NO: 10497 - DNA, 165 bp, Callithrix jacchus
ggaaagaaaatgtaaagataagaaagacttgaagagaacattttgggacacattttctacctctacaccctgtaggtgagtgtgggctatgttttgaagcagactggataggaaagaaaatgtaaagataagaaagacttgaagagaacattttgggacacattt

SEQ ID NO: 10498 - DNA, 111 bp, Callithrix jacchus
taaatgattctgattaccatgatccagttttataagaggttttcttttactctaagaatttgagatctgtcaaaacagtgcataaatgattctgaattaccatgatccagt

SEQ ID NO: 10499 - DNA, 121 bp, Callithrix jacchus
agatacattattaagttgtttattgaagtttttcttcttttctgatataggcacttacagctataaacatataaatgtataatagagatgcattattaagttgtttattgaagtttttctt

SEQ ID NO: 10500 - DNA, 112 bp, Callithrix jacchus
tctcactcttaagtgggagttgaagaatgagaacacattggcagactctacaaaaaattgttagaattacgctctcactcttaagtgggagttgaagaatgagaacacattg

SEQ ID NO: 10501 - DNA, 84 bp, Callithrix jacchus
aagataactggagtgactacttctttgacacattcacaagagattagccttgatgcccaaagataactggagtgactacttctt

SEQ ID NO: 10502 - DNA, 132 bp, Callithrix jacchus
atttataaatatttttaaggaatatgatatacactgaggtcaataatcaataacctgtcatgctccttgcttctataatgaatggtcatttataaatatttttaaggaatatgatatacactgaagtcaata

SEQ ID NO: 10503 - DNA, 111 bp, Callithrix jacchus
ctcaagaatatactagcaaattaaattcagcaacaggtacagatcaatatttcttatgaatgtaggtacaaaaatcctcaagaatatactagcaaactaaattcagcaaca

SEQ ID NO: 10504 - DNA, 93 bp, Callithrix jacchus
agaggagctacccactccagggtttcctgtctgctaatagctgaggaggcgacaggactaccagctgtgaagaggagctacccactgcagggt

SEQ ID NO: 10505 - DNA, 98 bp, Callithrix jacchus
ctgctgtctccaaatggagaccccggaagggatcaggctccccttccgtccacagacgtgcctgactaaatctactgctgtctccaaatggagatccc

SEQ ID NO: 10506 - DNA, 104 bp, Callithrix jacchus
tttagtaaacagtgcacaaggtaactacttttatgactgacagctttgattctttcaatcagcctgtcatagtttagtaaacagtgcacagggtaactactttt

SEQ ID NO: 10507 - DNA, 106 bp, Callithrix jacchus
ttcaaacatgacaagggaagccaaattattataaaaatagaattataatatattagcttaaaataatagaaactcaaattttcaaacatgacaaggtaagccaaat

SEQ ID NO: 10508 - DNA, 82 bp, Callithrix jacchus
tatagtccagaaagaatctcaaaatacaaagtgacaaaaatatatcacttatgtaatatagtccagaaggaatctcaaaata

SEQ ID NO: 10509 - DNA, 87 bp, Callithrix jacchus
ttgctatacctgtttgaagttacagcttttacatttttgttattgagttagttgctgatcatttgctatacttgtttgaagttacag

SEQ ID NO: 10510 - DNA, 114 bp, Callithrix jacchus
ctgacccctactatggatattagtaaagaaaggaaaggcttgaagtattttacaatctggcccttaacagaaaaaagtgctgacccctactatggatattatgtaaagaaagga

SEQ ID NO: 10511 - DNA, 137 bp, Callithrix jacchus
aaataagtgcatcctgtgttcttagttcttacactttaacctaaatatttgcgcctgagttacctggacaacgccagacgaggtcttaggggaaaataagtggcatcctgtgttcttagttcttacactttaaccta

SEQ ID NO: 10512 - DNA, 87 bp, Callithrix jacchus
ataaccacggggagaaatgcccgaacatgggagggacagtggctggtggggaggttggggagggataacacggggagaaatgcccga

SEQ ID NO: 10513 - DNA, 79 bp, Callithrix jacchus
ttcagcctccaagattatggtagaccgccttgttacttcttaagccccaaaagcattcagcctgcaagattatggtaga

SEQ ID NO: 10514 - DNA, 107 bp, Callithrix jacchus
ttttagcactgaataatattctattattctttattctaatattcttttatttactatatatttattattattctaatgttctttttagcactgaatgatattctatt

SEQ ID NO: 10515 - DNA, 81 bp, Callithrix jacchus
aagcactaaattcctctgtaactcattgtgttacatattccacaagtacagaagaagcattaaattcctctgtaactcatt

SEQ ID NO: 10516 - DNA, 110 bp, Callithrix jacchus
ctgggtagaatatgccatactcatccatctggcaggtcttccaatggctacaatcccttaagaagaattgtatgctactcatccactgggtagaatatgccatattcatc

SEQ ID NO: 10517 - DNA, 92 bp, Callithrix jacchus
atatgccaggcactgtttagtcatttgaatattttattcaaatatttattaaaatctaactatatatgccaggcactgttcagtcatttgaa

SEQ ID NO: 10518 - DNA, 104 bp, Callithrix jacchus
acagcctgggagacagagtgagactccttctcaaaaacaaaaacaaaaacagagagagagagagagagagagagagagagagagagagagagagagagagagag

SEQ ID NO: 10519 - DNA, 130 bp, Callithrix jacchus
tattattcaaaacttcttcagtatattctgaaaaaaaaattaaacatctaattggaaaaatggtgggattatgaatttcctttgtacttttctctattattcaaaacttcttcagtataatctgaaaaaa

SEQ ID NO: 10520 - DNA, 87 bp, Callithrix jacchus
gccccaactgatatacacgcccactgctgaggcagccagccgttgccgaggcaacccgccccaactgagatacacgcccactgctga

SEQ ID NO: 10521 - DNA, 122 bp, Callithrix jacchus
aatcaattgatacattattttttaatttttcctacccttaattgttttgagggagcctttttacttgttcaatgccttttctctgcttgataatcaattgatacattatttttaatttttct

SEQ ID NO: 10522 - DNA, 82 bp, Callithrix jacchus
gtcagcagtgggtgtgtatctcagtagggacgggttgcctcggcaatggctggctgcgtcagcagtgggcgtgtatctcagt

SEQ ID NO: 10523 - DNA, 84 bp, Callithrix jacchus
atgaggtataattttgagccaattcacttgaccacatgtagattccattttatatttgggatgaggtatgattttgagccaatt

SEQ ID NO: 10524 - DNA, 112 bp, Callithrix jacchus
ctattctttattattctgaaagagacatatcacacctgagccaccgggcctggctgaaaagtgctatattactatgccctattgtttattattctgaaagagacatatcaca

SEQ ID NO: 10525 - DNA, 129 bp, Callithrix jacchus
tgtattaaatatttaaataagtggaaaaagtaactcagatcgcctgttttcccagcttattacctgtattaatctaactgtttaaaactgtattaaatatttgaataagtggaaaaagtaactcagatc

SEQ ID NO: 10526 - DNA, 90 bp, Callithrix jacchus
aaactacattgagatactatctcttatcaggaaaaatgctaacatcactgtcatagaaatgcaaatcaaactacatgagatactatctct

SEQ ID NO: 10527 - DNA, 117 bp, Callithrix jacchus
ctcaattattctgatccctacctatcacttatttgttgcaatttttaaacgtatcatccttacgaaaaactccaaaataaaaagaactcaataattctgatccctacctatcactta

SEQ ID NO: 10528 - DNA, 103 bp, Callithrix jacchus
atttattgtgcagactaaatatgatatttctttgcttttcaaaaatgctttattgtgattaaatgatttattgtgctgactaaatatgatatttctttgcttt

SEQ ID NO: 10529 - DNA, 82 bp, Callithrix jacchus
ctcactgagacagcaggcggggccagagtgggccacgcaggaaaacacaccgacccaccctcacagagacagcaggcggggc

SEQ ID NO: 10530 - DNA, 103 bp, Callithrix jacchus
cacaagaacagaaaacctaaccctgcataagtgggtgttaaaccatcattatccagccaactgaccacaagaacagaaaacctaagcctgcataagtgggtgt

SEQ ID NO: 10531 - DNA, 94 bp, Callithrix jacchus
ggaacaagccctaatggaaaaggctcatcagcaactaaacaagccctgatggaaaaggactcatcagtaacggaacaagccctgatggaaaagg

SEQ ID NO: 10532 - DNA, 102 bp, Callithrix jacchus
ccagggagggcataaaagctctgggttcagggagcttccagatagttaaacatgtggaggcttctggagggtagtacaaccagggagggcatgaaagctctg

SEQ ID NO: 10533 - DNA, 86 bp, Callithrix jacchus
tgtgctgattatttcatcacctaggtattaagctaagtaaagtcaaatcatgggggattcatgtgcagattatttcatcacctagg

SEQ ID NO: 10534 - DNA, 106 bp, Callithrix jacchus
gttggtagtttcatgatgatgaatattatgattatataaaaaacccaactaaccattaaggtattattgtcatacagcatagttggtagtttcatgatgatgacta

SEQ ID NO: 10535 - DNA, 129 bp, Callithrix jacchus
caggcatgctagtgatttctgtacaatgattttgtgtcttgaattggcctaaattgcttatcactcagagcttttggactgcaggcatgctagtgatttctgtacaatgattttgtgtcttgaaattgg

SEQ ID NO: 10536 - DNA, 94 bp, Callithrix jacchus
aaaaaaaaaatttcagtctgggtaaattgattaaacgatatcagaaaaactagtcagaaagagcagtaatcagaaaaaaaatttcagtctgggt

SEQ ID NO: 10537 - DNA, 117 bp, Callithrix jacchus
gtatatatatatatatatatatatacaccatataattaagataattaacttatataattaagataaatatatatatactatataattaagatatatatatactatataattaagata

SEQ ID NO: 10538 - DNA, 117 bp, Callithrix jacchus
gggcttctatttgatccgcaaaaaaatgatcgatcctatccccaggctggcatgtctggcttacttgtgtggtcagtagggcttctatttgatccagcaaaaaaatgatcgatccta

SEQ ID NO: 10539 - DNA, 115 bp, Callithrix jacchus
ggggatttccccggttctgtgggcaactaatgctggctacgccagcggagacctctgcctggcgtcctgcgtctcttttatatcctggggatttccccgttctgtgggcaactaa

SEQ ID NO: 10540 - DNA, 107 bp, Callithrix jacchus
tgtatatccaaatgtataatttcaaagcatgattaatatgaaatcacatgaaaaaacatgaaatgaatttacaaatagttctgtatatccaaatgtataattttaaa

SEQ ID NO: 10541 - DNA, 127 bp, Callithrix jacchus
aataatttctacatttctccttttatctcatcttttacctcagattttactagcaaaaacagtgtttatcagaatatcaaattaaataatttctacatttctccttttatctcctcttttacctcag

SEQ ID NO: 10542 - DNA, 134 bp, Callithrix jacchus
taaatatacacaatattcatatttaaatgaataactgtaaatacatgtatatataaaatgtataaatatgtaaatgtatatatacacatttacatataaatataaatatatataaaatgtatacatatgtaaat

SEQ ID NO: 10543 - DNA, 115 bp, Callithrix jacchus
gaaattagaaatatagccagaggctttacacagtggcagtatttatttgtggctatatatgcagatatactagaaattagaaatatagccagaggctttgcacagtggcagtatt

SEQ ID NO: 10544 - DNA, 95 bp, Callithrix jacchus
tgagctcaagtgatcctcctgcctgggactatcagagttttccctatgttgcccaggctggtctggaactcttgagctcaagtgatcctcctgcc

SEQ ID NO: 10545 - DNA, 164 bp, Callithrix jacchus
tctcgaaaggccctactagcccagtgtctgtaccttttgtaacttatgttccagacatcattgattttattgactgaaaaatgtgtagccatggaaactgtggaaagcttgctctcgaaaggccctactagcccagtgttctgtaccttttgtaacttatgttc

SEQ ID NO: 10546 - DNA, 71 bp, Callithrix jacchus
caaacagtatttgtttttaaaaatttgtttataaaaattctgacacaacaaacagtacttgtttttaaaaa

SEQ ID NO: 10547 - DNA, 103 bp, Callithrix jacchus
aatttgcttcaacctggatataacaggcaagaacaacatttataaaagcagctgaactgatcgtttttaatggcatctaatttgcttcaacctggatataaca

SEQ ID NO: 10548 - DNA, 105 bp, Callithrix jacchus
aatctgaccattgtgctatgatgaaattgtaagggttattgctggaagtaggggatttaaatgttcaaaaagacaaatctgaccatgtgctatgatgaaattgta

SEQ ID NO: 10549 - DNA, 96 bp, Callithrix jacchus
aactttgtaacttcacttcagcttctgattggttactttccacaacgaatcagttgcttgcatagggtgtaaactttgtaatttcacttcagcttc

SEQ ID NO: 10550 - DNA, 139 bp, Callithrix jacchus
ggggaggggattatacaggaagtgggttattggggtcatcttagaattccactttactggccttgactggcctcctttagaaatatagatggggttggggggaggggattatacaggaagtgggtattggggtcatcta

SEQ ID NO: 10551 - DNA, 82 bp, Callithrix jacchus
gagactgttctttcctactccatagcaatatctgtcttagtgggatccccgggtaccgagctgttctttcctactccatagc

SEQ ID NO: 10552 - DNA, 124 bp, Callithrix jacchus
aatcaaacaaatgggacaaaaagatgcagaatacatcatctggttctctagaggcctagaaaaaaaaaaaatactgatgtaatcaaacaaatgggacaaaaagatgcagaatacatcatctggt

SEQ ID NO: 10553 - DNA, 126 bp, Callithrix jacchus
tgtcttgatcctttttaatacagaagagcaaaggcaaccagtgtttcctaccatgaagtaataatatcttaagatcattttttagggtgtcttgatcctttttaatacagaagagcaaaggcaacc

SEQ ID NO: 10554 - DNA, 82 bp, Callithrix jacchus
ctcccacaaactctagccccaccctggctaaaggcatcctgtgttctgaagggctcccacaaacctctagccccaccctggc

SEQ ID NO: 10555 - DNA, 124 bp, Callithrix jacchus
ctggagtgtgcttccctgtctacctttccctggtgtccggccttggaagaaaggaagaaagaaaagatgaacaaacccctcttctagcagatctggagtgtgcttccctgtctaccttccctgt

SEQ ID NO: 10556 - DNA, 125 bp, Callithrix jacchus
aatgaacagctttcacatagtcaagctgttggtagcactcaaggagcctttttagattagaggggtgatggagaaagcagccaaccatggtaaatgaacagctttcacatagtcaaagctgttgg

SEQ ID NO: 10557 - DNA, 140 bp, Callithrix jacchus
taaacctttacacatttttgtttccattgatggcttgatttaaatcagcatactgtttgtcagaaattatttcaacacacttaaatataaacctttacacatttttgttttccattgatggcttgatttaaatcagcata

SEQ ID NO: 10558 - DNA, 95 bp, Callithrix jacchus
attttatatataaaaacctgttgtatccccacaaaaatgttaaaagaataggtacatttttttcataattttatatatgaaaacctgttgtatcc

SEQ ID NO: 10559 - DNA, 98 bp, Callithrix jacchus
ccaaaataaactgattttacttaatgttagtactataaattttctctgctacagtaaagcactaaattgtaatatccaaaataaactgattttactta

SEQ ID NO: 10560 - DNA, 100 bp, Callithrix jacchus
gagaagacctacaaatttggctgaggctccaagaattcatgtcaacagctaatctctatcagaaaggaaaagagaagacctacaaattttggctgaggct

SEQ ID NO: 10561 - DNA, 88 bp, Callithrix jacchus
tgagctcggcgtgtctaacagccatgtaggattactatggaatactaagcagccataaaaaggatgagctcggcgtgtctaacagcta

SEQ ID NO: 10562 - DNA, 155 bp, Callithrix jacchus
agaaacggggctgtctcccaggaccagcctttgcacctgctgttctgcctggaatgccagcctctacctcctgtgtgcctgactgatctcgactcaccctttgacttagaaacggggctgtctcccaggaccagcctttgcacctgctgttctgc

SEQ ID NO: 10563 - DNA, 96 bp, Callithrix jacchus
gtatggacattttaacaatattgattcttccaatccatgaagaatctgtagattgcttaagttgtatggacatattaacaatattgattcttccaa

SEQ ID NO: 10564 - DNA, 81 bp, Callithrix jacchus
gatcacaccactgcactccagcatgggaaattaagtgagattctgtctcaaaaaaagatcacaccactgcactccagcctg

SEQ ID NO: 10565 - DNA, 144 bp, Callithrix jacchus
agtcaccacgccctcatggccgaagctgattgggtgacacccgatccacgagagccaatccagtctgagcaaagccaggcagctctgagagtgcatagtcaccacgccctcatggccgaagctgattgggtgacacctgatcca

SEQ ID NO: 10566 - DNA, 75 bp, Callithrix jacchus
ctgctttgactgagcctcgggcctcctcaccatgtcctgcctttcctgcttctgctttgactgagcctcgggcct

SEQ ID NO: 10567 - DNA, 105 bp, Callithrix jacchus
aggctggttttgaactcctgacctccatgcctggctaatttttctatttttagtagagatagggtttcgccatgttgaccaggctggtttcgaactcctgacctc

SEQ ID NO: 10568 - DNA, 112 bp, Callithrix jacchus
tataaagatgggaggcaagagagtcagcattagaaataaattaaatatattaaattataaattataatttataaattataaagatgggaggcaagagagtgagcattagaaa

SEQ ID NO: 10569 - DNA, 102 bp, Callithrix jacchus
tgtgcaaaacagaagcagatctcgcagttagaaattgaaatcccccacatccgtaaatcaaaacctaatttcctttgtgcaaaacagaagcagatctcgcag

SEQ ID NO: 10570 - DNA, 91 bp, Callithrix jacchus
ccttcatttcattgtttatccagttgaagttcaggagcaagttgtttgaaaaacatctttatttctaccttcatttcattgtttatccagt

SEQ ID NO: 10571 - DNA, 96 bp, Callithrix jacchus
cctaattcctgtgctttatttcttcactattattaaaatagcctccaaactgctttctctgatacctaattcctgtgctttatttcttcattatta

SEQ ID NO: 10572 - DNA, 105 bp, Callithrix jacchus
atttatatgtttataaggttgaatctacttcatctagaaagtcttttaaagctttccttatatagatattggtgtagaatttatatgttcataaggttgaatcta

SEQ ID NO: 10573 - DNA, 92 bp, Callithrix jacchus
ttggcttctccttggggcaaaggaaagtgtgaaactgtgatacaacctagtttatcttttgagggcacttggcttctccttggagcaaagga

SEQ ID NO: 10574 - DNA, 132 bp, Trypanosoma brucei
ggaagaaaggcgaaggcgcattgaagccgaggaagcgcggcgtgctaaagaggaggaggaaaggcgaaggcgcattgaggaggaggaccgtcgtcgcgcccatgaagaggaggaaaggcggaagcgggttga

SEQ ID NO: 10575 - DNA, 112 bp, Trypanosoma brucei
tgagtgtgcatatacgaatattataataatagcagtaataataataatagtaatgataataataataataggagagtgttgtgagtgtgtatatacgaatattataataata

SEQ ID NO: 10576 - DNA, 109 bp, Trypanosoma brucei
ttataatattcgtatatacacactcacaataccctcttattattattatcattattactattattattattattactgctctcattataatattcgtatatacacactc

SEQ ID NO: 10577 - DNA, 99 bp, Trypanosoma brucei
ttgtatatacacactcacaacactctcctattattatcatcatcattattattactgctcttattataatatacgtatatgcacactcacaacactctc

SEQ ID NO: 10578 - DNA, 111 bp, Trypanosoma brucei
ataatattcgtatacacacactcacaacacactcctattattattaatattattatcattattattattactgctgttattataatattcgtatacacacactcacaacac

SEQ ID NO: 10579 - DNA, 128 bp, Trypanosoma brucei
attattattattatcgttatcattattattattactgctctcattataatattcgtatatgcagactcacaacactctcctgttattatcattattatcgttatcattattattattactgctcttat

SEQ ID NO: 10580 - DNA, 929 bp, Mus musculus
cactgcatagaaacacacattcacatgttcactgcatactgtactctacagaaacacacattcacttgcccactgccatcaataaactcaaaagaaatacagtttcacatgaccactgccaaaattgcattcctgagaaacattcacaggcacactgcaccctgcactgcatagaatcaaacattcacatgcccactgctactttgcactctaatgaaacgcattcacatatacactgtgatcactgacctctacagaaacatgtgttcacatgcacactgccatccttctctctacaaaaccacacattgacttacccattgttgtcctgctctctactgaaacacacattcacttgccactctatactgtactctacagaaacacacgatcacatgcacaataagtactgcactccacagaatcacactttcacatgttcactgctatcctatactttagagaagcacacatttatatggccacttctatctctacactctacagaaacacatattcacttacttactactatcctacactcaacaaatacacatttccaagccacctgatttcttgcactctacagaaacacacattcacgttcccaaagccatcctgctctctacagaaattcatattcatatgcccattgcatacttcacactacagtgacatttacacacatttccagtgccacactgccctccacagaaacacaccttcatatgcccactgccaacttacactccatagaaatagtcatgtgcccactgttatcctgaactctacagatatacttgttctcatttccactgtattctacagaaacacacatacacatgcctgctgtcatcagagcacttaacataaacacatattcagatgctcattgctatcaatgtactcatacagtaatacacattcac

SEQ ID NO: 10581 - DNA, 450 bp, Mus musculus
gcatgtgagtgattatttctgtagagtacaggacagcagtaggtattggaatgtgtgttcctgcagagtgtactataacaatagccctgtgaatgtgtgttactgtagagtgcagtaatatcagtggccatgggattatgtttctttacagtgcagaagcacagtgtccatgtgaatatgtgtttctgtagagtgtagtatgcacttggaatgtgaatgtggttttctgtagagacaaggacagaggtgggcatgtgaatgtgtgttactgtagagtgcagtgatggcaatgggcatttgaatatgtgtttctgtagactgatgtaaagcaataagcatgtgaatgtgtgtttctgtagagtgcagggttggcacttggcatgtaaatatgtgtttccatacagtgtagtatattgtgggcatgaaaatgtgtgtttctataaagtacat

SEQ ID NO: 10582 - DNA, 1002 bp, Mus musculus
gtgaatgtgtgtttctgtagaatgcaaagtggcagtggcaatgtgaatgtgtgtttctgtagtgtggggaacaacagtggaatgggaatgtatgtctgtacaattcaggaaagcagtgaaattggattgtgtgtatctgtaaagtatgcagtgggcctgtgaatgtgtattactgtatgagtacattgatagcaatgagcatctgaatatgtgtttatgttaagtgctctgatgacagcaggcatgtgtatgtgtgtttctgtagaatacagtggaaatgagaacaagtatatctgtaggttcaggataacagtgggcacatgactatttctatggagtgtaagttggcagtgggcatatgaaggtgtgtttctgtggagggcagtgtggcactggaaatttgtgtaaatgtcactgtagtgtgaagtatgcaatgggcatatgaatatgaatttctgtagagagcaggatggctttgggaacgtgaatgtgtgtttctgtagagtgcaagaaatcaggtggcttggaaatgtgtatttgttgagtgtaggatagtagtaagtaagtgaatatgtgtttctgtagagtgtagagatagaagtggccatataaatgtgtgcttctctaaagtataggatagcagtgaacatgtgaaagtgtgattctgtggagtgcagtacttattgtgcatgtgatcgtgtgtttctgtagagtacagtatagagtggcaagtgaatgtgtgtttcagtagagagcaggacaacaatgggtaagtcaatgtgtggttttgtagagagaaggatggcagtgtgcatgtgaacacatgtttctgtagaggtcagtgatcacagtgtatatgtgaatgtgtttcattagagtgcaaagtagcagtgggcatgtgaatgtttgattctatgcagtgcagggtgcagtgtgcctgtgaatgtttctcaggaatgcaattttggcagtggtcatgtgaaactgtatttcttttgagtt

SEQ ID NO: 10583 - DNA, 542 bp, Mus musculus
ccatgtgaatgtgtgtttctgtagagtgcatcataggtaatgcgtgtgtgtgtgtgtgtgtgtgtgtgtgtttaattcagtgatggtaatgggcatgtgagtgactgttcctgtagagtacaggacagcagtaggtattggaatgtgtgttcctgcagagtgtactataacagtagccctgtgaatgtgtgttactgtagagtgcagtaatatcagtggccatgggattatgtttctttacagtgcagaagcaaagtgtccatgtgaatatgtgtttctgtagagtgtagtatgcacttggaatgagaatgtggttttctgtagagacaaggacagaggtgggcatgtgaatgtgtgttactgtagagtgcagtgatggcaatgggtatttgaatatgtgtttctgtagactgatgtaaagcaataagcatgtgaatgtgtgtttctgtagagtgcagggttggcacttggcatgtaaatatgtgtttccatacagtgtagtatattgtgggcatgaaaatgtgtgtttctgtaaagttcat

SEQ ID NO: 10584 - DNA, 280 bp, Mus musculus
tcatgtgaatgtgtgtttctgtagagtgtaggttagcagctctcatgtgggtttatgtttctgtagagtacagactagcagagggcatttgaacatgtttttctgtggagtgtataaattccattggacatgtatttgtttatgtagagtgcagggttgacagtgggcatttaaatttgtgtttccttagggtgcagcatggcagtgagaatatgaatgtgtgtttctgttgagtgcagtatgcattgggcatgtgaatgtgtctttctttaatgtgcag

SEQ ID NO: 10585 - DNA, 249 bp, Mus musculus
tttgtttgcttgcttgcttgcttgcttgcttgcttgcttgtttgaactgagatttcttgtatcccaggatagcctccatcttccttccttccttcctttcttcctttcttccttccttcctttctttctttctttctttctttctttctttctttctttctttctttctttctttctttctttctttcttccttccttccttccttccttccttcctttctttctttctttctttctttctttctttct

SEQ ID NO: 10586 - DNA, 77 bp, Mus musculus
tagcccagattaaaggtgtgttccaccacacctttaatcccagatgaaaggcatagcccagattaaaggtgtgttcc

SEQ ID NO: 10587 - DNA, 77 bp, Mus musculus; identical to SEQ ID NO: 10586

SEQ ID NO: 10588 - DNA, 104 bp, Mus musculus
cagttgaatccttcttaacagtctgctttacgggaacctttatcaccgtcgttccccagctgatgagttctgaattcggcagttgaatccttctcaacagtctg

SEQ ID NO: 10589 - DNA, 233 bp, Mus musculus
cgatgtgaatgtgtgtttctgtggagtgcaggatagcagtggacatgtaaatttgtgttttttttagagtgcagagtggcatagggaatatgtatgtttctgttgagtaaagcagtggtcatgtgaatgtgtgtttctgtagagtgtaggttagcagcactcatgtgggtttatgtttctgtagaatatagactagcagagggcatttgaacatgtttttctgtggagtgtat

SEQ ID NO: 10590 - DNA, 77 bp, Mus musculus; identical to SEQ ID NO: 10586

SEQ ID NO: 10591 - DNA, 77 bp, Mus musculus
tagcccagattaaaggtgtgttccaccacacctttaatccaagatgaaaggcatagcccagattaaaggtgtgttcc

SEQ ID NO: 10592 - DNA, 156 bp, Mus musculus
tgaaagaaatacaggaaaacacaagtaagcagaagccctaaaagaggaaacaaataaatcccatgaagaaatacaggaaaacacaaccaaacacacgaaggacttgagcaaatcagtccaagacctaaaagtggaaataaaaacaataaagaacac

SEQ ID NO: 10593 - DNA, 90 bp, Mus musculus
ttttgtgtttcctctttaaggtcttttacctgtttagcatttttttcctgtaattacttgaggagtttttgtgcttcctctttaaggtct

SEQ ID NO: 10594 - DNA, 72 bp, Mus musculus
tgcctggtgtctgcttgctgaaaaaaactcgactatagctgccattttgtgcctggtgtctgcttgctgaaa

SEQ ID NO: 10595 - DNA, 104 bp, Mus musculus
cagactgttgagaaggattcaactgccgaattcagaactcatcagctggggaacgacggtgataaaggttcccgtaaagcagactgttaagaaggattcaactg

SEQ ID NO: 10596 - DNA, 91 bp, Mus musculus
aagcattaaggttctcaggtatagagatgaaggtaaggttcccgggaaaaggggaacaaagcattaaggttctcaggaatagagatgaagg

SEQ ID NO: 10597 - DNA, 136 bp, Mus musculus
ctttgcttgtagcatgggggagtagagtatatgtgtatacatttatattgtgtttgtgtgtgtgtgtgtgtgttgtgaaggcagctttgcttgtagcatgggggagtagagtatatgtgtatatatttatattgtg

SEQ ID NO: 10598 - DNA, 97 bp, Mus musculus
ctctcagtaccttacagaacctcattatcatacctcatttgcatgtctcacatctgattggttatactctcagtaccttacagaacctcattatcat

SEQ ID NO: 10599 - DNA, 97 bp, Mus musculus; identical to SEQ ID NO: 10598

SEQ ID NO: 10600 - DNA, 105 bp, Mus musculus
attcagaactcttcagctggggaatggtggtaatgaagtgttcccgtaaaacagactgttgagaaggattcaactgcgtgaattcaaaactcttcagctggggaa

SEQ ID NO: 10601 - DNA, 93 bp, Mus musculus
tgtgttttcctgtatttctttaagggatttgtatgtttcctctttaaggtcttcaacctgtttacctgtgttctcctgtatttctttaaggga

SEQ ID NO: 10602 - DNA, 508 bp, Mus musculus
tatgtaaatgattgcttatgtttaagccaatcaaatcacttatttttagccaagtcacaataacatttctacaaaaatgaaggactgtgttttcaccaatcagagcattctccttctagtgtcagaagtaagcatattatgcaaatgaaggcttgtgtatggaccaatcacactattcacttttatatcagtcatgatagccttactatgcaaatgaaggattgtgtatgcaccaataacaaaattgtttacctttattaatgacgtaagtatgttattcaaatgaaggtttgtgtttagaccaatccaaagaatgttttgcaccagttaaaagcaaatatcttatgcaaacgaaggtttaagtttaaaccaattaactcacttacttgtagccaagtcacaatagccttacaatgcaaatgaaggactctgtatgtaccagtcatagtattctccatttaatcactctcggatgtaagcattgtatttaaatgaagagttgtatttg

SEQ ID NO: 10603 - DNA, 135 bp, Mus musculus
ttattaaatgaaggtttgtcttggaaccaatggaacaagtgtttaaaaccttgcctgttatgcaaatgaaggcttatgcttaaaccaatcaacacatttatttagccttactatgcaaatggaggactttgtttg

SEQ ID NO: 10604 - DNA, 167 bp, Mus musculus
gctcttgcgctctggctcctaaagatgtaagcaataaagctcttgcgctcttgctctctggctcctaaagatgtaagcaatagagcttttgctcttgcactcttgctctggctcttgcactctagtgctcttgcgctctggctcctaaagatgtaagcaatagagct

SEQ ID NO: 10605 - DNA, 92 bp, Mus musculus
attatgctcattttttaaaacatagtttcttccttattatagcatggtaatataattatacctacgcattatgctcatttcttaaaacatag

SEQ ID NO: 10606 - DNA, 102 bp, Mus musculus
ctaagtgttccagataagtccagtggtaaaacaaatcaaaaccaaaaccataaaacaggatccttattggagggaaggctatagtgttccagataagtccag

SEQ ID NO: 10607 - DNA, 91 bp, Mus musculus
ctcatctgattggttattctctctcagtacctcactgagcctcattatcatacctcatttgcatgtctctcatctgattggttattctctc

SEQ ID NO: 10608 - DNA, 99 bp, Mus musculus
ctttattgcttacatcttcaggagccagagagcaagagagcaagagagagggcaagagcgcaagagcgcaagagctttattgcttacatctttaggagc

SEQ ID NO: 10609 - DNA, 110 bp, Mus musculus
aaatattctttctctctctctctctctctctctctctctctctctctctctctctctctctctcccttccttccttccttccttcctttctctctctctctctctctctc

SEQ ID NO: 10610 - DNA, 99 bp, Mus musculus
ataaagttgccaggaagtaggcacaaagtaacccaggagtttgggaaggacctcggataaaatagaggcaagtataaagttgccaggaagcaggcacaa

SEQ ID NO: 10611 - DNA, 95 bp, Mus musculus
ccatctgtcagtttggtcttcccctctcctctcctcttccctcccctccctctcatctcctcccatctgtcagttcggtcttcccctctcctctc

SEQ ID NO: 10612 - DNA, 147 bp, Mus musculus
taaagaaatagaagcagtcattaatagtctcccaacccaaaatgcccaggaacagatgggtttagtacagagtgacctaaacagtcctatatcccttaaagaaatagaagcagtcattaatagtctcccaaccaaaaatgcccagga

SEQ ID NO: 10613 - DNA, 109 bp, Mus musculus
cctactatcaacttcctataaatccttacgtaggtgaggtgcctactgttaactgcctataaataaatctttataaaggggtaacacttactgttaactgcctataaat

SEQ ID NO: 10614 - DNA, 90 bp, Mus musculus
gacttctacctgtttagcagtgttttcctgtaattctttgagggtgttttgtgcttcctctttaaggacttctacttgtttagcagtgtt

SEQ ID NO: 10615 - DNA, 89 bp, Mus musculus
tgttttcctgtaattccttaaggtatttttgagttttttctttaaggtcttctaactgtttacctctgttttcctgtaattctttaagg

SEQ ID NO: 10616 - DNA, 87 bp, Mus musculus
ttttcctgcaattctttaagggatttttgtgtttcctctttaatgtcttctacctgtttggtttttttcctgcaattctttaagtga

SEQ ID NO: 10617 - DNA, 109 bp, Mus musculus
gttcctcagctgaagagttctgaatccatgcagttgaatctttctcagcagtttgttttgcaggaacacttcattaccaccgttccccagctgaagagttctgaatcca

SEQ ID NO: 10618 - DNA, 111 bp, Mus musculus
ccatatacaggaatttacaatggcctaggaagaaggaaggttgtggtctaagaaggaacttagagtaaaagctgagtcactcccatatacaggaatttccaatggcctagg

SEQ ID NO: 10619 - DNA, 96 bp, Mus musculus
tacaggagaacactgctaaacatgtagaagcccttaaacaggaagcacaaaattccctcaaggaattacaggagaacactgctaaacaggtagaag

SEQ ID NO: 10620 - DNA, 77 bp, Mus musculus
tagcccagattaaaggtgtgttccaccacacatttaatcccagatgaaaggcataggccagattaaaggtgtgttcc

SEQ ID NO: 10621 - DNA, 101 bp, Mus musculus
actggggcaatagtggcatgattgttattaatcctccaaggtataatagcaaccttccaggcaagaaaggcccactggggcaatagtggcatgattgttat

SEQ ID NO: 10622 - DNA, 80 bp, Mus musculus
aaggtgtagcccagattaaaggtgtgtcccaccacacctttaatcccagatgaaaggcgtagcccagattaaaggtgtgt

SEQ ID NO: 10623 - DNA, 80 bp, Mus musculus; identical to SEQ ID NO: 10622

SEQ ID NO: 10624 - DNA, 77 bp, Mus musculus; identical to SEQ ID NO: 10586

SEQ ID NO: 10625 - DNA, 77 bp, Mus musculus; identical to SEQ ID NO: 10586

SEQ ID NO: 10626 - DNA, 88 bp, Mus musculus
aagtacttttcagcaggaggggtggggcaatagaaatgcacaagcaaaaggggaagtacaagtacttctcagcaggaggggtggggca

SEQ ID NO: 10627 - DNA, 99 bp, Mus musculus
gttccatatatgtatgtatgtatgtgtgtgtgtttgtgtgtatatatatatatatatatatatatgtatatatatatatatatatacatatatatatat

SEQ ID NO: 10628 - DNA, 98 bp, Mus musculus
acaaatgtaacctgttacttccttacctaaactcagtttccagcaactatttcagatgtaagctttcacaaatataacctgttacttccttacctaaa

SEQ ID NO: 10629 - DNA, 121 bp, Mus musculus
ggtcctaatttcatttcatgtcgtttttctcaataaagacaattattatgtgaataatcctatgacccgaatttttctggaaggtcctaatttcatttcatgtcatttttctcaataaaga

SEQ ID NO: 10630 - DNA, 94 bp, Mus musculus
ttttatccgaggtccttcccaaatcacttttactttgtgcctgcttcctggcaactttatatttgcctctattttatccgaggtccttcccaaa

SEQ ID NO: 10631 - DNA, 212 bp, Mus musculus
tctctgcctctctgctctctccctctctgctctcccctctctccctcttccccctccctctccccctctccctctcctcctccctctccctttccccctccctctccctctctccgtccctttcttttctctcttcttctcttctcttctcttctcttctcttctcttctcttctcttctcttctcttctcttctcttctcttctcttctct

SEQ ID NO: 10632 - DNA, 90 bp, Mus musculus
agaacactgctaaacaggtagaagcccttaaagaggaagcacaaaaatccttcaaggaattacagtagaacactgctaaataggtagaag

SEQ ID NO: 10633 - DNA, 372 bp, Mus musculus
aaaaccataaaaaatgagaaacacacattgtagaacatcatatatacagcagttacaatgaaaacacaccttggatatcgaaacacacatcgtaaatcagtatttacagtgaaaaacatggaaagtgagaaacggacattgtagaacatggtataaatacacaccttgtatatcgaaacacacatcgtatattcagtatttgcagttaaaaacatggaaaatgagaaacggacattgtagaacatggtataaaaggagttatttgaaaaacaaggaaaatgaggaaaaccactgtgcagaacattgtgtattagtgagttacaatgaaaatcataaaaattgagaaacgcaaattgtaaaacatggtatata

SEQ ID NO: 10634 - DNA, 235 bp, Mus musculus
atacatccctccctccctgcctcctttccttccttccatcattccttacttccttcattcccccttccatccttctttctttctttccatacttttttctcacttactctctttctttcttcactcctttacttctttctcttccttccttccttccttccttccttccttccttccttccttccttccttccttccttccttccttccttccttccttccttccttttttaagt

SEQ ID NO: 10635 - DNA, 79 bp, Mus musculus
ccgtttgatgctcaccagtctttccgttcccagaatgcctgaaattgagtaacggccgtttgatgttcaccagtctttc

SEQ ID NO: 10636 - DNA, 90 bp, Mus musculus
aagaacttgaatcgtcccacttacctcaatagtccctaagctgggaaccttattgtctctaaccaagaacttgaattgtcccacttacct

SEQ ID NO: 10637 - DNA, 79 bp, Mus musculus
tgattcttaattttagaagagggacttcaaaggtgtaatattttgttttgtctaggtgattcttaattttagaagaggg

SEQ ID NO: 10638 - DNA, 130 bp, Mus musculus
gcagttgaatccttctcaacagtctgttttacgggaacacttcattaccaccattccccagctgaagagttctgaattcacgcagttgaatccttctcaacagtctgttttacgggaacacttcattacc

SEQ ID NO: 10639 - DNA, 97 bp, Mus musculus
atgataatgaggttctgtaaggtactgagagtataatcaatcagatgtgagacatgcaaatgaggtatgataatgaggttctgtaaggtactgagag

SEQ ID NO: 10640 - DNA, 95 bp, Mus musculus
caagaatataaacaacagaaccagatgtaatttagcacagatataaattagcacaaccagatggcaaaagaccaagaatataaacaacagaagcc

SEQ ID NO: 10641 - DNA, 79 bp, Mus musculus; identical to SEQ ID NO: 10635

SEQ ID NO: 10642 - DNA, 125 bp, Mus musculus
tgttgagaaggatccggcgtggattcagaactcttcagctggggaacggtggtaatgaagtgttcctgcaaaacagagtgttgagaaggatccggcatggattcagaactcttcagctggggaac

SEQ ID NO: 10643 - DNA, 140 bp, Mus musculus
agaacccaaaagaaagaaagaaagaaagaaagaaagaaagaaagaaagaaagaaagaaagagagagagagagagagagagagagagagagaaagggaggggggagggagggagggagagagagagagagagagagagaga

SEQ ID NO: 10644 - DNA, 94 bp, Mus musculus
cctcactcctgaatgtctgaaaaaaaggagggaactaaagggggagaaaatgtaaaaatgtctattgacctcacacctgaatgtctgaaaaaaa

SEQ ID NO: 10645 - DNA, 94 bp, Mus musculus
tttttttcagacattcaggtgtgaggtcaatagacatttttacattttctccccctttagttccctcctttttttcagacattcaggagtgagg

SEQ ID NO: 10646 - DNA, 74 bp, Mus musculus
cagcagtgattagagaaatcactgttggaatagcaacctgctgctgctggcagctagtgattagagaaatcact

SEQ ID NO: 10647 - DNA, 75 bp, Mus musculus
agtgatttctctaatcactagctgccagcagcagcaggttgctattccaacagtgatttctctaatcactgctgt

SEQ ID NO: 10648 - DNA, 75 bp, Mus musculus; identical to SEQ ID NO: 10647

SEQ ID NO: 10649 - DNA, 75 bp, Mus musculus; identical to SEQ ID NO: 10647

SEQ ID NO: 10650 - DNA, 74 bp, Mus musculus; identical to SEQ ID NO: 10646

SEQ ID NO: 10651 - DNA, 74 bp, Mus musculus; identical to SEQ ID NO: 10646

SEQ ID NO: 10652 - DNA, 74 bp, Mus musculus; identical to SEQ ID NO: 10646

SEQ ID NO: 10653 - DNA, 74 bp, Mus musculus; identical to SEQ ID NO: 10646

SEQ ID NO: 10654 - DNA, 75 bp, Mus musculus; identical to SEQ ID NO: 10647

SEQ ID NO: 10655 - DNA, 75 bp, Mus musculus; identical to SEQ ID NO: 10647

SEQ ID NO: 10656 - DNA, 167 bp, Mus musculus
aaaatacatggaaatgagtaaagcacgttgtagaacgtcgtatatacaagaattacaatgaaaactatggaaattgaaagaaaaactcaccgtataacattttgtatgagtgagttagaagaaaaacatatataaggagaaacgcacattgtagaacaccatacata

SEQ ID NO: 10657 - DNA, 111 bp, Mus musculus
tggattcagaactcttcagctggggaacagtggtaatgaagtgttcccgcaacacagactgttgagaaggattcaactgcgtggattcagaactcttcagttggggaacag

SEQ ID NO: 10658 - DNA, 109 bp, Mus musculus
ttttcctgtttttctataaggacttctacctgtttggttgtgttttcctgtttttctttaaggacttgtaactctttagcagtattttcctgtttttctttaaggactt

SEQ ID NO: 10659 - DNA, 109 bp, Mus musculus
gttccccaactgaagagttctgaatccacgcagttgaatccttctcaacagtttgtgttgcgggaacactttattaccaccgttccccagctgaagagttctgaatcca

SEQ ID NO: 10660 - DNA, 3214 bp, Mus musculus
aatttcttctccttgttttccttcttcttcttctactttttatccttcttcgtcttatccttctcctccttattcttttctcctttccttctcctttcccttcttcttctgcttctactcccctttcttcctcttcctcttcctcttcctcttcctcttcctcctcttcctcttcctcctcttcctcttcctcttcctcttcctcctcttcctcttcctcttcctctttctcttcctcttcctcttcctcttcctcttcctcttcttgttcttcttgttcttgttcttgttcttgttcttgttcttgttcttgttcttcttcttcttcttcttcttcttcttcttcttcttcttcttcttcttcttcttcttcttcttcttctgctcctactcccctttcttcttcttctcctcctttcctcctcctcttcctccttcttttccccctcctctttctcctcctcttcctcctcctcttcctccttctcttcctcctcttcctcctccttcttctccttccttcttcttcttccttcatcttctttcttcttgttcttgttctacttgttcttctgtttcttcttgttcttcttgttgttcttgttcttcttcttgttcttcttcttgttcttcttcttgttcttcttcttgttcttcttcttgttcttgttcttgttcttgttcttgttcttgttcttgttcttgttcttgttcttcttcttcttcttcttcttcttcttcttctttcttcttgttcttcttgttcttcttcttcttctttcttcttgttcttgttcttgttcttcttcttcttctttcttcttgttcttgttcttgttcttcttcttcttcttgttcttcttgttcttgttcttgttcttgttcttgttcttgttcttcttcttgttcttcttcttcttcttcttcttcttcttcttcttcttcttcttcttcttcttcttcttcttcttcttcttcttcttcttcttctccttcttctccttcttcttcttctataccttcgactttgccttctcttcctccttctcttattctcattccaaaattctctcctcctcatttaactttctccttttctcattctccttctctttgttctcctccttctttttgctcttcttcttcctcttcttttgttcttcttccttcttctccttgtgttctgctccacccattcctcttcccttccttcttctcctctccctctccatatatttctccttctctttctttttttcttctccttatttaccttcttcttctattgtttctccttctttgccttatccttctcctccttattcttttctccttctgcttctccttttccttcaccttctcctcctactcctgtttcttcttcttcttcttcttcttcttcttcttcttcttcttcttcttcttcttcttcttcttcttcttcttcttcttcttcttcttcttcttttcttcttcttcttcttcttcttcttcttcttcttctgtttcttctgtttcttcttcttcttcttcttcttcttcttcttcttcttcttcttcttcttcttcttcttcttcttcttcttcttcttcttcttcttcttcttcttcttcttctatgcctttgacttctccttctcttcctccttctcttattctccttctctccttctctcctccttatttaaccttctccttttctacttctccaagtcctcctccttctttttgctcttcctcttcttttgttcttcttccttctccttctccttgtcgttctgctccacccattcctcttcctttccttcttctctcttcctctccatattcttctcctttactttcttttcttctccttgtttaccttcttcttctattgtttctccttctttgccttatccttctcctccttattcttttctccttctgcttctccttttccttcgccttctcctcctactcctgtttcttcttcttcttcttctccttcttcttcttcttcttcttcttcttcttcttcttcttcttcttcttcttcttcttcttcttcttctcctttttccttattcttcttccttcttccttcttcgttcttgttcttgttcttcttgttcttcttgatattgtccttggtctccttctcctcctcattcttcttcttcttcttcttcttcttcttcttcttcttcttcttcttcttcttcttcttcttcttcttcttcttccttattcttcttccttcttccttcttctttcttgttcttcttcttcttcttcttcttgatattgtccttggtctccttctcctcctcattcttcttcttcttcttcttcttcttcttcttcttcttcttcttcttcttcttcttcttcttcttcttcttcttctatgcctttgacttctttttctcttcctccttctcttattctccttctctcctccttatttaaccttctccttttctacttctccaagtcctcctccttctttttgctcttcctcttcttttgttcttcttccttctccttctccttgtcgttctgctccacccattccccttcctttccttcttctctcttcctctccatattcttctccttcactttctttttttcttctccttgtttaccttcttcttttattgtttttccttctttgccttatccttctccttcttattcttttctcctttgcttctccttttcctttgccttctcctcctactcctgtttcttcttcttcttcttcttcttcttcttcttcttcttcttcttcttcttcttcttcttcttcttcttcttcttcttcttcttcttcttcttccttattcttcttccttcttccttcttgtttttcttcatcttgttcttgttcttcttaatcttgtccttcgtctctttcttcttcttcttcttcttcttcttcttcttcttcttcttcttcttcttcttcttcttcttcttcttcttcttcttcttcttcttcttctatgccttttacttctccttctctcattcttcttctctccttctctcctccttatttaaccttcttttctacttctccaagtcctcctccttccttttgctcttcctcttcctcttcttttgttcttcttccttctccttctccttgtcgttctgctccacccattcctcttccattccttcttctcctcttcctctccatattcttctccttctctttcttttt

SEQ ID NO: 10661 - DNA, 170 bp, Mus musculus
agaaagcaagttagagagtaagaaaggtgaacacttagagaaagaggtaaaagtttacaaagagtaaggattgtaaaggttagagagagagagagagagagagagagagagaaagagagagagagagagagagagagagagaaagagagagaaagagagagagagagaaa

SEQ ID NO: 10662 - DNA, 816 bp, Mus musculus
atagaaagagagacattcacagagttacacacattcacacaacttaattaagaagtatttagaaaaatatatctatgaaatcacgaggatattaagtactaaattatgtgagcaatgaggaggaatgagatccaaaataaattttgcaagtcctccaacattctccatgcttctacacagctagagctgtgggcgtatcagttatagggctgtaacttttgttttcttcatttataatttactgtgaatctcctttctcccccattctatatggtctgtagtttccatgtggaaggactttccaaagcatggcatctagtgacaaagagaaaagaatttaaaaaaagagtctctatgctagagccaactgtacaaacaattcgtagttattctccaaatgcagggctcaaagaacacagaggctcctctagctgctacacagatcttaagtatggccccacagcatcactgggaacctattgacaattctcactcaggtcataaaactatggagcattccaatttcttgcgttccagaaaaaaagccatttggaatcttatctccataaaagtaaagattgcactgaaatttatgaaatgtgagaataattttaaacgtgaaaaatcattccacacacacacattaaaaaatacatgtaggcaaaattgacagcaatctatttgacacaacacccacacacacccacacacacccacacacacacacacacagagagagagagagggagagagagagagagagagagagagagagagagagagagagagagagagagagagagagagagagagaga

SEQ ID NO: 10663 - DNA, 76 bp, Mus musculus
tggtcttgaactcaacatatagctgttatcacaaggtccaaaggacctcaagctggtcttgaactcaacatatagc

SEQ ID NO: 10664 - DNA, 109 bp, Mus musculus
gttccccaactgaagagttctgaatccacacagttgaatccttctcaacagtttgtgttgcgggaacacttcattaccaccgttccccagctgaagagttctgaatcca

SEQ ID NO: 10665 - DNA, 92 bp, Mus musculus
tttaggaaagtatgtttataatacttgttatacttatgcatggcaggctacattagttgttagtagaaatttaggaaagtatgtttagaata

SEQ ID NO: 10666 - DNA, 94 bp, Mus musculus
accctgaaacactaactaaaatcctgagactataaaatcaatcctaccctcccccaaaatacctacaaaaccctgaaacattaactaaaatcct

SEQ ID NO: 10667 - DNA, 98 bp, Mus musculus
agcaagtgagaaataggaagagaaggaagaggagaaaggagagagaaagagagagagagagagagagagacagagagagagagacagagagtgacaga

SEQ ID NO: 10668 - DNA, 102 bp, Mus musculus
gaagtaaagtgggaaatagctttacaaggtacgcctggccttgaactttctaacgaaattcaagacagtctatcagaagtaaagtaggaaatagctttacaa

SEQ ID NO: 10669 - DNA, 91 bp, Mus musculus
gtaccttacagaacctcattatcatacctcatttgcatgtctcaaatctgattggttatactctcagtaccttacagaaccttattatcat

SEQ ID NO: 10670 - DNA, 97 bp, Mus musculus
ctctcagtaccttacagaacctcattatcatacctcatttgcatgtctcaaatctgattggttatactctcagtaccttacagaacctcattatcat

SEQ ID NO: 10671 - DNA, 119 bp, Mus musculus
ttcccagcctccatggcctgggacccccttcagtgtcccccaaaggaatagtaataccgtagcccaattggggaatctcttgcagggttcccagcctccacggcctgggacccccttca

SEQ ID NO: 10672 - DNA, 98 bp, Mus musculus
agcaagtgagaaataggaagagaaggaagaggagaaaggagaaagaaagagagagagagagagagagagagagagagagagagagagagagagagaga

SEQ ID NO: 10673 - DNA, 131 bp, Mus musculus
agaaacagacagacacacacagaaacacacacagacacaatcagacagaaacagagagagacagagagagagagagagagagagagagagagagagagagagagagagagagagagagagagagagagaga

SEQ ID NO: 10674 - DNA, 122 bp, Mus musculus
tttatggtttattatgtttaacagtatagaaatgtactttatggtttattatggtttattatttatggtttattatgtttaacatattatggtttattattaatggtttattatgtttaaca

SEQ ID NO: 10675 - DNA, 102 bp, Mus musculus
ggcagtattgagtcctgaggggcagtatcttagggcctggagaggttccatctgttgagtcctgaatggcagtattgagtcctgaagggcagtatcttaggg

SEQ ID NO: 10676 - DNA, 71 bp, Mus musculus
aaaaatgaaggagggagagagagagagaaagagagagagagagagagagagagagagagagagagagagag

SEQ ID NO: 10677 - DNA, 104 bp, Mus musculus
ctagcacataagagagagagagaggacatgtgaagcctagcacctaagagagagagagagagagagagagagagagagagagagagagagagagagagagagag

SEQ ID NO: 10678 - DNA, 103 bp, Mus musculus
agtagcaagtgagaaataggaagagaaggaagaggagaaaggagagagagagagagagagagagagagagagagagagagagagagagagagagagagagaga

SEQ ID NO: 10679 - DNA, 101 bp, Mus musculus
cgaggtgggactcgaacccacgatcccgcaacaaaacacgaggtgggactcgaacccacgatctcgcaacaaggcgcgaggtgggactcgaacccatgatc

SEQ ID NO: 10680 - DNA, 107 bp, Mus musculus
gactctaggagtccgtctgaggtggggagtgtactccttcgaccatctgtatttctgaagtcctgagcaaggggaaggactctaggagtccatctgaggtggggagt

SEQ ID NO: 10681 - DNA, 96 bp, Mus musculus
tcctgaagggcagtattaagtcctgaaggacagtatcttagggcctggagaggttctatctgttgagtcctgaagggcagtattgagtcctgaagg

SEQ ID NO: 10682 - DNA, 108 bp, Mus musculus
ttccccaactgaagagttctgaatccacagagttgaatccttctcaacagtctgtgtggcgggaacacttcattaccaccattccccagctgaagagttctgaatcca

SEQ ID NO: 10683 - DNA, 137 bp, Mus musculus
taacacacacatgtacatatacacctggatatactgagtcactgacacacacacatggaaacattcacacacacacacacacacacacacacacacacacacacacacacacacacacacacacacacacacacatt

SEQ ID NO: 10684 - DNA, 106 bp, Mus musculus
attcagaactcctcagctggggaacggtggtaatgaagtgttcccgtaaaacagactgttgagaaggattcaactgcgtgaattcagaactcttcagctggggaac

SEQ ID NO: 10685 - DNA, 80 bp, Mus musculus
tatggtagagcattttggggtatatgctgtaaacactgaaggtttacttatgatatggtagagcattttggggtatatgc

SEQ ID NO: 10686 - DNA, 108 bp, Mus musculus
ttccccaactgaagagttctgaatccacgcagttgaatccttctcaacagtctgtgttgcgggaacacttcattaccaccattccccagctgaagagttctgaatcca

SEQ ID NO: 10687 - DNA, 104 bp, Mus musculus
ttcaggactcaatactgcccttcaggactcaacagatggaacctctccaggccctaagatactgcccttcaggactcaatactgcccttcaggactcaacagat

SEQ ID NO: 10688 - DNA, 105 bp, Mus musculus
taagagagagagagaggacatgtgaagcctagcacctaagagagagagagagagagagagagagagagagagagagagagagagagagagagagagagagagaga

SEQ ID NO: 10689 - DNA, 120 bp, Mus musculus
atccttctcaacagtctgttttacgggaacacttcattaccaccgttccccagctgatgagttctgaatccaggctggatccttctcaacagtctgttttacgggaacacttcattacca

SEQ ID NO: 10690 - DNA, 108 bp, Mus musculus
tggattcagaactcttcagctggggaatggtggtaatgaagtgttcccgcaacacagactgttgagaaggattcaactgcgtggattcagaactcttcagttggggaa

SEQ ID NO: 10691 - DNA, 109 bp, Mus musculus
tggattcagaactcttcagctggggaacggtggtaatgaagtgttcccgcaacacaaactgttgagaaggattcaactgcgtggattcagaactcttcagttggggaac

SEQ ID NO: 10692 - DNA, 104 bp, Mus musculus
atctgttgagtcctgaagggcagtattgagtcctgaatggcagtatcttagggcctggagaggttccatctgttgagtcctgaagggcagtattgagtctgaag

SEQ ID NO: 10693 - DNA, 106 bp, Mus musculus
attcagaactcttcagctggggaacggtggtaatgaagtgttcccgcaacacaaactgttgagaaggattcaactgtgtggattcagaactcttcagttggggaac

SEQ ID NO: 10694 - DNA, 199 bp, Mus musculus
ctcctaacactagagaaagttcaaggccaaacataccttgtaaagctatttcccactttacttctgatagactgccttgaatttcgttagaaagtttaaggccagacttaccttgtaaagctatttcccactttacttctgatagactgtcttgaatttcgttagaaagtttaaggccagacttaccttgtaaagctat

SEQ ID NO: 10695 - DNA, 109 bp, Mus musculus; identical to SEQ ID NO: 10664

SEQ ID NO: 10696 - DNA, 101 bp, Mus musculus; identical to SEQ ID NO: 10679

SEQ ID NO: 10697 - DNA, 107 bp, Mus musculus; identical to SEQ ID NO: 10680

SEQ ID NO: 10698 - DNA, 96 bp, Mus musculus; identical to SEQ ID NO: 10681

SEQ ID NO: 10699 - DNA, 108 bp, Mus musculus; identical to SEQ ID NO: 10682

SEQ ID NO: 10700 - DNA, 106 bp, Mus musculus; identical to SEQ ID NO: 10684

SEQ ID NO: 10701 - DNA, 80 bp, Mus musculus; identical to SEQ ID NO: 10685

SEQ ID NO: 10702 - DNA, 108 bp, Mus musculus; identical to SEQ ID NO: 10686

SEQ ID NO: 10703 - DNA, 104 bp, Mus musculus; identical to SEQ ID NO: 10687

SEQ ID NO: 10704 - DNA, 105 bp, Mus musculus; identical to SEQ ID NO: 10688

SEQ ID NO: 10705 - DNA, 120 bp, Mus musculus; identical to SEQ ID NO: 10689

SEQ ID NO: 10706 - DNA, 105 bp, Mus musculus
gtagcacataagagagagagagagaacatgtgaagcctagcacctaagagagagagagagagagagagagagagagagagagagagagagagagagagagagaga

SEQ ID NO: 10707 - DNA, 109 bp, Mus musculus; identical to SEQ ID NO: 10691

SEQ ID NO: 10708 - DNA, 104 bp, Mus musculus; identical to SEQ ID NO: 10692

SEQ ID NO: 10709 - DNA, 106 bp, Mus musculus; identical to SEQ ID NO: 10693

SEQ ID NO: 10710 - DNA, 199 bp, Mus musculus; identical to SEQ ID NO: 10694

SEQ ID NO: 10711 - DNA, 145 bp, Mus musculus
gtagcacataagagagagagagagaacatgtgaagcctagcacctaagagagagagagagagagagagagagagagagagagagagagagagagagagagagagagagagagagagagagagagagagagagagagagagagaga

SEQ ID NO: 10712 - DNA, 145 bp, Mus musculus
gtagcacataagagagagagagagaacatgtgaagcctagcacctaagagagagagagagagagagagagagagagagagagagagagagagagagagagagagagagagagagagagagagagagagagagagagagaggacct

SEQ ID NO: 10713 - DNA, 221 bp, Mus musculus
aactcaaaaagaaaaaaaaaaacaaacaaacaaaaaacaaacaaaacaaacaagaaagaaagaaagaaagaaagaaagaaagaaagaaagaaagaaagaaagaaaaaagaaagaaacaaagaaagaaacaaagaaagaaagaaagaaagaaagaaagaaagaaagaaagaaagaaagaaagaaagaaagaaagaaagaaagaaagaaagaaagaaagaaag

SEQ ID NO: 10714 - DNA, 339 bp, Mus musculus
acttaaaaaaaaaagaaaaaaaaaaaaaagaaaagaagaaagacagaaagacagaaagaaagaaagaaagaaagaaagaaagaaagaaagaaagaaagaaagaaagaaagaaagaaagaaagacagacagacagacagacagacaaagagagagagagagacaggaagggaggaaggaaggaaggaaggaaggaaggaaggaaggaaggaaggaaggaaggaagggagggagggagggagagagagggaggaagaaatgaaggaaggaaggaaaaaaggaaggaaggaagaaggaaggaagaaaaaggaagaaaggaaggaataaaggaaggaaggaca

SEQ ID NO: 10715 - DNA, 181 bp, Mus musculus
aagaaaccacaaaaaaaaaaaaacaaaaaccaaaaaccaaaaaacaaaacaaaaaaagaaagaaaaaaaaacaaagaaaaacaaagaaaaaagaaagaaagaaagaaagaaagaaagaaagaaagaaagaaagaaagaaagaaagaaagaaagaaagaaaggaaggaagaaagaaagaaag

SEQ ID NO: 10716 - DNA, 708 bp, Mus musculus
aaaaaaaaaaaaaacaaacaaaacaaaacaaaatgaacaaacaaagacacagatttggttcagttttgcgatcttgtatatttttaatttttttagaatttcagtgtttttcttaatggttttaagaagagtgttctagagggtttttttttggttttcagtattttagtgtttttttagtgtttttttcggtttttttttttaatattagggtttttgagggttttgggatattttttaggctttatatgtttttttagtttttttttgtttgttttggtgagtgtgtgtatgtgtgaatatgtgtgtgtgtagtgtgtgtgtgtgtgtgtgtgtgtgtgtgtgtgtgtgtgcgcgtgtgtgtgtgtgtgtgtgtgtgtgtgtgtgtgtgtgtgtgtgtgtgtttgagatttttttaaatttaactttaagattttatttttggagtttaagagttttagggtggccaggcaatggtggcccatgcctttaatcccagcaattgggaggtagatctagagcaattggatttgtgagttcgaggacaaccttatccacaaagtgagagtcagaagagccagggatacacagaggaacccaatctccaaaaattcaaaagagagaaagaaagaaagaaagaaagaaagaaagaaagaaaggaaggaaggaaggaaggaaggaaggaaggaaggaaggaaggaaggaagg

SEQ ID NO: 10717 - DNA, 109 bp, Mus musculus
gttccccaactgaagagttctgaatccacgcagttgaatccttctcaacagtttgtgttgcgggaacacatcattaccaccgttccccagctgaagagttctgaatcca

SEQ ID NO: 10718 - DNA, 108 bp, Mus musculus; identical to SEQ ID NO: 10686

SEQ ID NO: 10719 - DNA, 121 bp, Mus musculus
tggtaatgaagtgttcccgtaaaacagactgttgagaagattccagcctggattcagaactcctcagctggggaacggtggtaatgaagtgttcccgtaaaacagactgttgagaaggatt

SEQ ID NO: 10720 - DNA, 108 bp, Mus musculus; identical to SEQ ID NO: 10690

SEQ ID NO: 10721 - DNA, 109 bp, Mus musculus
gttccccaactgaagagttctgaatccacgcagttgaatccttctcaacagtttgtgttgcgggaacacttcattaccaccgttccccagctgaagagttctgaatcca

SEQ ID NO: 10722 - DNA, 89 bp, Mus musculus
ctgaagggcagtatcttagggcctggagaggttccatctgttgcgtcctgaagggcagtattgagtctgaagggcagtatcttagggac

SEQ ID NO: 10723 - DNA, 109 bp, Mus musculus
gttccccaactgaagagttctgaatccacgcagttgaatccttctcaacattctgtgttgccagaacacttccttaccaccgttccccagctgaagagttctgaatcca

SEQ ID NO: 10724 - DNA, 109 bp, Mus musculus
tggattcagaactcttcagctggggaacggtggtaatgaagtgttcccgcaacacaaactgttgagaaggattcaactgtgtggattcagaactcttcagttggggaac

SEQ ID NO: 10725 - DNA, 104 bp, Mus musculus; identical to SEQ ID NO: 10588

SEQ ID NO: 10726 - DNA, 108 bp, Mus musculus; identical to SEQ ID NO: 10686

SEQ ID NO: 10727 - DNA, 109 bp, Mus musculus; identical to SEQ ID NO: 10664

SEQ ID NO: 10728 - DNA, 110 bp, Mus musculus
cctctattttatccgaggtccttcccaaactcctgggttactttgtgcctacttcctggcaactttatgctcacctctattttatccgaggtccttcccaaactcctggg

SEQ ID NO: 10729 - DNA, 106 bp, Mus musculus
caggaagtgagaaataggaagagaaggaagaggagaaaggagagagagagagagagagagagaaagagagagagagagagagagagagagagagagagagagagag

SEQ ID NO: 10730 - DNA, 99 bp, Mus musculus
gactcaatactgcccttcaggactcaacagatggaacctctacaggccctaagatactgcccttcaggactcaatactgcccttcaggactcaacagat

SEQ ID NO: 10731 - DNA, 110 bp, Mus musculus
taagagagagagagagaacatgtgaagcctagcacctaagagagagagagagagagagagagagagagagagagagagagagagagagagagagagagagagagagagaa

SEQ ID NO: 10732 - DNA, 109 bp, Mus musculus; identical to SEQ ID NO: 10691

SEQ ID NO: 10733 - DNA, 89 bp, Mus musculus; identical to SEQ ID NO: 10722

SEQ ID NO: 10734 - DNA, 89 bp, Mus musculus
ctgaagggcagtatcttagggcctggagaggttccatctgttgagtcctgaagggcagtattgagtctgaagggcagtatcttagggac

SEQ ID NO: 10735 - DNA, 111 bp, Mus musculus
ctgttccccaactgaagagttctgaatccacgcagttgaatccttctcaacattctgtgttgccggaacacttccttaccactgttccccagctgaagagttctgaatcca

SEQ ID NO: 10736 - DNA, 89 bp, Mus musculus; identical to SEQ ID NO: 10734

SEQ ID NO: 10737 - DNA, 109 bp, Mus musculus
gttccccaactgaagagttctgaatccacgcagttgaatccttctcaacattctgtgttgcgggaacacttccttaccaccgttccccagctgaagagttctgaatcca

SEQ ID NO: 10738 - DNA, 89 bp, Mus musculus; identical to SEQ ID NO: 10734

SEQ ID NO: 10739 - DNA, 109 bp, Mus musculus; identical to SEQ ID NO: 10737

SEQ ID NO: 10740 - DNA, 109 bp, Mus musculus; identical to SEQ ID NO: 10664

SEQ ID NO: 10741 - DNA, 109 bp, Mus musculus; identical to SEQ ID NO: 10724

SEQ ID NO: 10742 - DNA, 89 bp, Mus musculus
ctgaagggcagtatcttagggcctggagaggtttcatctgttgagtcctgaagggcagtattgagtctgaagggcagtatcttagggac

SEQ ID NO: 10743 - DNA, 109 bp, Mus musculus
tggattcagaactcttcagctggggaacggtggtaaggaagtgttcccgcaacacagaatgttgagaaggattcaactgcgtggattcagaactcttcagttggggaac

SEQ ID NO: 10744 - DNA, 99 bp, Mus musculus
gactcaatactgcccttcaggacgcaacagatggaacctctccaggccctaagatactgcccttcaggactcaatactgcccttcaggactcaacagat

SEQ ID NO: 10745 - DNA, 89 bp, Mus musculus; identical to SEQ ID NO: 10734

SEQ ID NO: 10746 - DNA, 109 bp, Mus musculus; identical to SEQ ID NO: 10743

SEQ ID NO: 10747 - DNA, 99 bp, Mus musculus; identical to SEQ ID NO: 10744

SEQ ID NO: 10748 - DNA, 828 bp, Mus musculus
ttcttctccttgtttaccttcttcttctattgtttctccttctttgccttatccttctcctccttattcttttctccttctgcttctccttttccttcgccttctcctcctactcctgtttcttcttcttcttcttcttcttcatcttcttcttcttcttcttcttcttcttcttcttcttcttcttcttcttcttcttcttcttcttcttcttcttcttccttattcttcttccttattcttcttccttctttgttcttcttcttgttcttcttgttcttcttgatattgtctttggtctccttctcctcctcattcttcttcttcttcttcttcttcttcttcttcttcttcttcttcttcttcttcttcttcttcttcttcttcttcttcttcttcttcttcttcttcttcttcttcttcttcttcttccttattcttcttccttattcttcttccttctttgttcttcttcttgttcttcttgttcttcttgatattgtctttggtctccttctcctcctcattcttcttcttcttcttcttcttcttcttcttcttcttcttcttcttcttcttcttcttcttcttcttcttctatgcctttgacttctccttctcttcctccttctcttattctccttctctccttctctcctccttatttaaccttctccttttctacttctccaagtcctcctccttctttttgctcttcctcttcttttgttcttcttccttctccttctccttgtcgttctgctccacccattcctcttcctttccttcttctctcttcctctccatattcttctccttcactttctt

SEQ ID NO: 10749 - DNA, 306 bp, Mus musculus
tcagcctagcacataagtgagagaggggacctgggcagcctagcatataagtgagagagagaccctgcccagcctagcacataagtgagaaagagggcctgcaaggactaacatctaagtgagagagaggtcctgggaagcctagcacataagagagagaagggccctgggcagtgtagcacataagagagagagagagaacatgtgaagcctagcacctaagagagagagagagagagagagagagagagagagagagagagagagagagagaggacctgcccagcctaacgcctaagtgagaga

SEQ ID NO: 10750 - DNA, 364 bp, Mus musculus
cgctcaggccctctctctcacttaggcgttaggctgggcaggtcctctctctctctctctctctctccctccctccctccctccctccgtttctccctccctccctctctctctctctctctctctctctccctccctccctccctccctccgtttctccctccctccctctctctctctctctctctctctctctctctctctctctctctctctctctctctctctccctccctccctccctccctccctccatttctccctccctctctctctctctctctctctcctctctctctctctctctctctctctctctctcttaggtgctaggcttcacatgtcctctctctctctctcttat

SEQ ID NO: 10751 - DNA, 120 bp, Mus musculus
gaaacagacagacacacacagaaacacacacagacacaatcagacagaaacagagagtgagacagagagagagagagagagagagagagagagagagagagagagagagagagagagaga

SEQ ID NO: 10752 - DNA, 120 bp, Mus musculus
gaaacagacagacacacacagaaacacacacagacacaatcagacagaaacagagtgagacagagagagagagagagagagagagagagagagagagagagagagagagagagagagaga

SEQ ID NO: 10753 - DNA, 110 bp, Mus musculus
gaaacagacagacacacacagaaacacacacagacacaatcagacagaaacagagtgagacagagagagagagagagagagagagagagagagagagagagagagagaga

SEQ ID NO: 10754 - DNA, 120 bp, Mus musculus; identical to SEQ ID NO: 10752

SEQ ID NO: 10755 - DNA, 89 bp, Mus musculus; identical to SEQ ID NO: 10722

SEQ ID NO: 10756 - DNA, 89 bp, Mus musculus; identical to SEQ ID NO: 10734

SEQ ID NO: 10757 - DNA, 109 bp, Mus musculus; identical to SEQ ID NO: 10737

SEQ ID NO: 10758 - DNA, 99 bp, Mus musculus; identical to SEQ ID NO: 10744

SEQ ID NO: 10759 - DNA, 89 bp, Mus musculus; identical to SEQ ID NO: 10722

SEQ ID NO: 10760 - DNA, 89 bp, Mus musculus; identical to SEQ ID NO: 10734

SEQ ID NO: 10761 - DNA, 109 bp, Mus musculus; identical to SEQ ID NO: 10724

SEQ ID NO: 10762 - DNA, 89 bp, Mus musculus; identical to SEQ ID NO: 10742

SEQ ID NO: 10763 - DNA, 109 bp, Mus musculus; identical to SEQ ID NO: 10743

SEQ ID NO: 10764 - DNA, 103 bp, Mus musculus
caggaagtgagaaataggaagagaaggaagaggagaaaggagagagagagagagagagagagagagagagagagagagagagagagagagaaagagagagaga

SEQ ID NO: 10765 - DNA, 211 bp, Oryza sativa
cgattgagataactattaggcccgtcaccgatgaatgtcatccatggcaggctccaacttagactcgattgagataactattaggcccgtcactgatgaatgtcatccatgacgggctccaacttgaggcccgattgagataactattaggccgttatagatatttattgcacagtataaattgcccgattgagataatgctttgactagg

SEQ ID NO: 10766 - DNA, 240 bp, Oryza sativa
aaaaccggcacctatagacctttttctacatccgcgggttaaaatcgcaaaaaaccggcacctttaagtaattataggtgtcggttctaaataaaaaccgactcctattctattttgtgtcgtttttttttaaaaaaatcgagcctttaatattaaaaaccggcacctataataagtttgtgtgggattttttttaaacacggaacctttaatattgaaaactggcacctataataagtt

SEQ ID NO: 10767 - DNA, 195 bp, Oryza sativa
caaccggggctaaagatcaccgggatctttagccccggttggtataccaaccgggactaaagttacggttggtataccaaccgggactaaagatcccggtggggcctgacatgacctgacagcattcgaaccgggactaaagatgatctttagtcccggttggtaacacaaaccgggactaaagatcaaatatgc

SEQ ID NO: 10768 - DNA, 301 bp, Oryza sativa
ttgatctttagtcccggtttgtgttaccaaccgggactaaaaatcatctttagtcccggttcgaatgctgtcaggacctgtcaggcccccccgggatctttagtcccggttggtaacaccaaccgggactaaagatcttaacttaccaaccgggactaaagatcccggtgatctttagccccggttggtgctaccaaccgggactaaagatcttaactttagtcccggttggtaatactaaccgggactaatgatcccagtgatctttagtcccggttggtgctaccaaccgggactaaag

SEQ ID NO: 10769 - DNA, 293 bp, Oryza sativa
atttctattatttttaaattgtattcttctttcaatagttcatattttttaattcatatttcagttatttataaattgtattctttatggactatatactccttcttccaatattccttattattttagtttctaatttaagttatttataaattgtatttctatatgtactttaatgtccacttctatttttcttattttttaattttgattttcaattagttctagattgtatgcctcttttaatatttcttatttttaattcttaatttctattattttaaaattgtatt

SEQ ID NO: 10770 - DNA, 206 bp, Oryza sativa
ggaggggggagagccgacgccgcgcctgtcttcgatccggagctcgtcgttgattcgggccacggcgtggaggccagagatccaccgccgcccgacgtcgacgacggccaccgccgccgacgcccgacgccgacgcggaggccagagatccatcgccgcccgccgctcaggccacgacacggaggccagagatccgtcatcgccgc

SEQ ID NO: 10771 - DNA, 436 bp, Oryza sativa
gaggaggaagagcaatgggcaacattttatagagaggaggaagatcaaggggcaatgttctatagggaggaagaaaagagcaaagcaatattttatagaaaggaggaagatcaaagtgcagtgttttatagggaggaggacgtggagcaagagacattgtttacgggacacggggaagagcaagaggcagtgttttgtagggacgaggaagatgccttctatagggaggaggacgagcaagagggccaagaggcagccttttatagggaggaggagaagcaagagagaatgtttactagggaagaggagagggggtatgaagaagatgaagatgaagaggcagtgttttacagggataacgaagatgaagatgaagatgaagagcaagtgttttacagggataatgaagatgaagatgaagaggcagtgttttaca

SEQ ID NO: 10772 - DNA, 243 bp, Oryza sativa
taacgttcgtcctcgttcgttcgctcgttcacgttccctagctcgttcacgttcgttcgctcgttcttattcacgttcgttcgcttgttctcattcacgttcgttccctcgttctcgcttgtcttcgatcgatcgttctcgttctcgctctcgttcgttcgatcgttctcgttctcgttcacgttctcgcggcaacgtacgttgacgtgttcgttctcgctctcgtttgttcgatcgttctcg

SEQ ID NO: 10773 - DNA, 184 bp, Oryza sativa
caaggcggccggcggcggtggcccgcgcggtgaccgggcgcaaggcggccggtggcggtggcccgcgcggcggcggggcgcaaggcggctagacacaaggcgaccggtggcggtggcctgtgcgacggccgggcttcggtggccttcgcgacggctgggcgcaaggcggccggcggcccacggc

SEQ ID NO: 10774 - DNA, 233 bp, Oryza sativa
aacaaactttggacctgcactaaagctaagcagatctcccaggccaggcccgtgtgtgtaacaaactttggacctgcactaaagctaagcacgcccgcttctcaacaaactttggacctgcactaaagctaagtagattctcaacaaactttggacctgcactaaagctaagcagatctcccaggccaggcccgtgcgtgtaacaaactttggacctgcactaaagctaagca

SEQ ID NO: 10775 - DNA, 184 bp, Oryza sativa
tttccttcaatctctctcttccacgtcaccatagcaattatctttctctttccttctttctctctcttccacgtcaccaaatatacttacatgacaataaagagagacatttccttctttctctctcttccacgtctccatagcaactatctttctctttccttctttctctctcttccacgtc

SEQ ID NO: 10776 - DNA, 105 bp, Oryza sativa
tttcgtcctcgcttcatgtaaaaagtccaagtcccgacggacaggcacacttacatataccactccacttacattttcatcctcgcttcatgtaaaaagtccaag

SEQ ID NO: 10777 - DNA, 105 bp, Oryza sativa
aaacaattgaggtgatatggcttatgagacaataaaagaagggtgatattttggatcataaatcaatcatctaagtgctataaacaattgaagtgatatggctta

SEQ ID NO: 10778 - DNA, 108 bp, Oryza sativa
acggtttacgacgcaaaccgacaaagatggacaaacctacaaagagatgtcgcactctcacagcggtggcggacggtttacggcgcaaaccgacaaagatggacaaac

SEQ ID NO: 10779 - DNA, 96 bp, Oryza sativa
agcgtaaatagttactttattacatgggcggcgaaggcccagcacacacaaagacaaacgggaaacagcgtaaatagttactttattacatgggcg

SEQ ID NO: 10780 - DNA, 104 bp, Oryza sativa
ctatattacggacttgaaatcaattgaacaatacatgtaggtataaaattaaaaattttggcatgatctttgctatattacggacttaaaatcaattgaacaat

SEQ ID NO: 10781 - DNA, 87 bp, Oryza sativa
aaacagtcttgacgacaaggacgtattcgatgtgagcaaaataatgggtgccgaatccctgtaaacagtcttgacgacagggacgta

SEQ ID NO: 10782 - DNA, 106 bp, Oryza sativa
ggcccaagcgacgcgcccgtggcctcgtcgccagctgccccggaagttgtcgcctgagtgtcgcctgagggagtgggcccaagcgacgcgcccgcggcctcgtcgc

SEQ ID NO: 10783 - DNA, 92 bp, Oryza sativa
ttatattcttcctaaaactaaacaaatagacaatcagtggcaagctagtcaagaacagcaaattatattcttcctaaaactaaacaaataga

SEQ ID NO: 10784 - DNA, 102 bp, Oryza sativa
ccttcaatcgaattcgccctcgaattcatccaaccatactctagaacatgggatattacattcctccctccttcaatcgaattcgccctcgaattcgtccaa

SEQ ID NO: 10785 - DNA, 95 bp, Oryza sativa
ccttcaatcgaattcgccctcgaattcatccaaccatactctagaacatggggtattacattcctccctccttcaatcgaattcaccctcgaatt

SEQ ID NO: 10786 - DNA, 89 bp, Oryza sativa
ttaataagatgtttataagatgtttaatggactttaagaatgtcatacaatgatttagaaatatttataagatgtttaatggactttaa

SEQ ID NO: 10787 - DNA, 89 bp, Oryza sativa
ccgaatccttggaaacagtcttgacgacaaggacgtattcgatgtgagcaaaataatgggtgccgaatccctggaaacagtcttgacga

SEQ ID NO: 10788 - DNA, 89 bp, Oryza sativa
gcaaggaggcgagggccctgccgagcgcgtcggcagcagcggcgagcacgtcgtctgcgcaaggaggcgagggccctgccgagcgcgtc

SEQ ID NO: 10789 - DNA, 91 bp, Oryza sativa
ccgaatccttggaaacagtcttgatgacaaggacgtattcgatgtgagcaaaataatgggtgccgaatccttggaaacagtcttgacgaca

SEQ ID NO: 10790 - DNA, 79 bp, Oryza sativa
ttaagcgctccactaaaatagttttatgtgtaaaagtttcaatactatattgcggtttaagcactccactaaaatagtt

SEQ ID NO: 10791 - DNA, 198 bp, Oryza sativa
gaattcatacatttgtttaattattaattacatctaaattaataccgcgaattgatttcttatggagagtactaaaaattatctataatctataggaattcatccaattatattttcattaatcctatatttaaatgctagtattttaggtatttaattagtaagaattcatctaattatattttcattaatcctata

SEQ ID NO: 10792 - DNA, 168 bp, Oryza sativa
agtataggacactgaatttaacaaggtgaaagcccataaggatcaaatctgattttgttttccttgtgttgtttatgaaagaaatcttatataatctggtatgatcaaatgagagtataggacactgaatttgacaaggtgaaagcccataaggatcaaatctgattt

SEQ ID NO: 10793 - DNA, 91 bp, Oryza sativa
aatctagaactagatataatatattatagtacaataaatttgaacagttatagttttataggaaataaatctagaactagatatgatatat

SEQ ID NO: 10794 - DNA, 102 bp, Oryza sativa
ttattttaatacttatatacaacttatattatagtggaatcatattattatagtggaatcatattattaatacttattttaatacttatatacaacttatat

SEQ ID NO: 10795 - DNA, 107 bp, Oryza sativa
gctggggagtaggtgtaggagcacgaggaggagtcggtgcaggatcctgaggaggagtcgatgctggagcctgcggtggagacggtgctggcggagcatgaggagga

SEQ ID NO: 10796 - DNA, 107 bp, Oryza sativa
gtgagcttgggggcaaacccttcggttttcgtcgttcggcttcgcccaaaacacttcgccctatggcttcgccacagggttgtgagcttggggacaaacccttcggt

SEQ ID NO: 10797 - DNA, 112 bp, Oryza sativa
cctatttgacagccacgtggcaatttagattagaatcggcaccttttaagaccatataggtgctggttctaacctcaaaaccggcacctatttgacagccacgtggcaattt

SEQ ID NO: 10798 - DNA, 91 bp, Oryza sativa
tgtcgtcaagactgtttccagggattcggcacccattattttgctcacatcgaatatgtccttgtcgtcaagactgtttccaaggattcgg

SEQ ID NO: 10799 - DNA, 95 bp, Oryza sativa
tatctagtcaaactaaagcccaatttaaagattgtaacctttactatttaagaattttaagattgaagatatctagtcaaactaaaagcccaatt

SEQ ID NO: 10800 - DNA, 68 bp, Oryza sativa
gaaccgggactaaagatgatctttagtcccggttggtaacacaaaccgggactaaagatcaaatatgc

SEQ ID NO: 10801 - DNA, 168 bp, Oryza sativa
tttggattaacgggactagtgaagtttccatcatgaattttaagtagagcagaaaaaataatgaaacaatcttatttgaacaaatttgcacatctaataatatatacatttaaatttggattaacgggactagagaagtttccatcatgaattttaagtagagcagaa

SEQ ID NO: 10802 - DNA, 137 bp, Oryza sativa
tgctagtgaaattatctagagggcacatggtggttattgggcaatgtgtacaaacatccatgttgtgcccctactatctcccctgctcacctcattgctagtgaaattatctagagggcacatggtggttattgggc

SEQ ID NO: 10803 - DNA, 74 bp, Oryza sativa
gaaaatgcatcgtgctgacatcatcaccagcccccacgctgacagtatcttgaaaatgcatcgtgccgacatca

SEQ ID NO: 10804 - DNA, 74 bp, Oryza sativa
cccccgactggaaaccagtcggctgaagctggaattggagttgaccaagagcccccgactggaaaccagtcgga

SEQ ID NO: 10805 - DNA, 112 bp, Oryza sativa
gcctgagcgtcgcccgagggagtgggcccaagcgacgtgcccgctgccacgtcgccagctgccccggaagttgtcgcctgagcgtcgcccgagggagtgggcccaagcgacg

SEQ ID NO: 10806 - DNA, 65 bp, Oryza sativa
aatttagtttttaactacaattagaaaatcttacatctacaagttaaattttaactacatatgta

SEQ ID NO: 10807 - DNA, 80 bp, Oryza sativa
aagttaaattttaactccacaacgatgtcatctcaacccacacccaattgtatctaagttaaattttaactccacacgaa

SEQ ID NO: 10808 - DNA, 109 bp, Oryza sativa
tcggcccgtcacaggtgaggggataccagtgacgggttggaagaaaaactcgtcactggtatacctctgacgggttttcctttcggcccgtcacaggtgagcggatacc

SEQ ID NO: 10809 - DNA, 77 bp, Oryza sativa
gggacccaccggtcagcggcacgggagagagagaaagggggcggcggctcgcgggcccaccggtcagcggcacggga

SEQ ID NO: 10810 - DNA, 77 bp, Oryza sativa; identical to SEQ ID NO: 10809

SEQ ID NO: 10811 - DNA, 103 bp, Oryza sativa
atgttgaaacattttttttcgagctatgaaacattacagcatttatttaacatacagtgtaacatcgtttggagatttcatgttgaaacattttttttgagcg

SEQ ID NO: 10812 - DNA, 74 bp, Oryza sativa
ccgactggtttccagtcgggggctcttgagttgttgccgtttcagttgttgccgactggtttccagtcggcggc

SEQ ID NO: 10813 - DNA, 109 bp, Oryza sativa
tggcggattaacaaaacaaacgcttctaaaaatgtattggagggttcttggccatgagccactagcgaaaaccgatttttattggcggactaacaaaacaaacgcttct

SEQ ID NO: 10814 - DNA, 105 bp, Oryza sativa
gtcggggtcggcggtggtgacgaacacgtccatcgccgggagcagcgcgtcatcgtcaagcgctgctatgccgtcggggtcggcggtggtgacgaacacgtccat

SEQ ID NO: 10815 - DNA, 137 bp, Oryza sativa
aggtagtagtgggaacgtgggatcgtggacgcgccgttgcggaggcagtcgtgggaacgtgggttcgtggttgcaatgtgggatcgtggacgcgccgttgcgaaggcagtcgtgggaacgtgggttcgtggttgcaa

SEQ ID NO: 10816 - DNA, 91 bp, Oryza sativa
ccgaatccttggaaacagtcttgacgacaaggacgtattcgatgtgagcaaaataatgggtgccgaatccctggaaacagtcttgacgaca

SEQ ID NO: 10817 - DNA, 100 bp, Oryza sativa
tagcaaaagtgcccgtgcgttgcaccgggtgattacagagtgtgtatattgaccaaaagtgttgtttggtttagcaaaagtgcccgtgcgttgcaccggg

SEQ ID NO: 10818 - DNA, 75 bp, Oryza sativa
actttcctaaagataaaaggaaaggataaagtccttataggacactaaacacactttcctaaagataaaaggaaa

SEQ ID NO: 10819 - DNA, 110 bp, Oryza sativa
attttacttatttgtaaatttttattgctatatggattctagactatttttctacttttagtttttcttttttctttagttcctagtttcaattagttctaaattcctat

SEQ ID NO: 10820 - DNA, 108 bp, Oryza sativa
acaaataggataaaagtaaacaatatgtaagaagtactaggaaagcacttgatcatacataatatgtgccacataataacaaataggatgaaagtaaacaatatgtaa

SEQ ID NO: 10821 - DNA, 115 bp, Oryza sativa
gccgtcgtcgacacatgctcgccgcctccggccgtcgtcgacgcgcgctcgccacctccggacatcatcgcgccaaccggcgcctccagccgtcgtcgacgcacgctcgccacct

SEQ ID NO: 10822 - DNA, 105 bp, Oryza sativa
caaactggtaattgcacataaaaataattacacttttcaaatattactaattttaaattttttaactaaatttttacacttcaaatggtaattgcacataaaaat

SEQ ID NO: 10823 - DNA, 93 bp, Oryza sativa
tgttttgcaaacctagggtgatagtggctcaattatatctctaggaaagtaaatcacgctcctatgtcaatgttttgcaatcctagggtgata

SEQ ID NO: 10824 - DNA, 93 bp, Oryza sativa; identical to SEQ ID NO: 10823

SEQ ID NO: 10825 - DNA, 100 bp, Oryza sativa
cccggtgcaacgcacgggcacttttgctaaaccaaacaacacttttggtcaatatacacactctgtaatcacccggtgcaacgcacgggcacttttgcta

SEQ ID NO: 10826 - DNA, 95 bp, Oryza sativa
tagcaaaagtgcccgtgcgttgcaccgggtgattacggagtgtgtatattgatcaaaagtattgtttggtttagcaaaagtgcccgtgtgttgca

SEQ ID NO: 10827 - DNA, 85 bp, Oryza sativa
cacctattcttcacttgatattcagaaacatttcatactgcaaactttcaggcttttcacctattcttcacttgatattcagaaa

SEQ ID NO: 10828 - DNA, 121 bp, Oryza sativa
atgcttccttcgtccgtcaaaaacaaaaaaaatagcagaaaaataaaaaaaaggtctctactacttaaaaaataagatatgcttccttcgtccgtcaaaaacaaaaaaaatagcgaaaaaa

SEQ ID NO: 10829 - DNA, 102 bp, Oryza sativa
aagcgtaacaccaaatagaacatgtaccgaaacatgccatgtagaaaaaacagaagaagtttatcaggaaagtaagaaaagcgtaacgccaaatagaacatg

SEQ ID NO: 10830 - DNA, 76 bp, Oryza sativa
actttcctaaaagataaaaggaaaacataaagtacttatgggacactaaacacactttcctaaagataaaaggaaa

SEQ ID NO: 10831 - DNA, 102 bp, Oryza sativa
ttttttaacattagcaaatcattacttttttaaaaaacttttatttccattttttaaataccattttttcattttttaacattagtaaatcattactttttt

SEQ ID NO: 10832 - DNA, 75 bp, Oryza sativa
ttataaaaattgaagatgtttccgcggtccgtcatccatgtttgagtcggttataaaaattgaagatgtttccgc

SEQ ID NO: 10833 - DNA, 123 bp, Oryza sativa
aggcccgtttgagatatggaatgttatctcaaacgggcctaaagttggtgcccgtcacatatgatggtcatctgtgacgggccgtaactttaggcccgtttgagatgtggaatgttatctcaa

SEQ ID NO: 10834 - DNA, 84 bp, Oryza sativa
agtttagggaccgggatgacacagtcgaaccagtttgaggacctgaacagttgatttgcgagtttagggaccgggatgacacag

SEQ ID NO: 10835 - DNA, 133 bp, Oryza sativa
taaatagatagtttttcttatattgcaactctgcaaacatgcatactgtagcagatacattaaaaggagaccggagggagtatactcttcttaaatagatagtttttcttatattgtaactctgcaaacatgc

SEQ ID NO: 10836 - DNA, 197 bp, Oryza sativa
cagccatataggtggcggttcatttaaaaccgacataacctttttcccacatccacaccatgaaaaaaatatagtaccggcacctttaagtactataggtgtcagttctataaaaaaaccggcacctatactataggtgccggttttttaaatagaactgacacctatatttacattatacgtgtcggttttagagg

SEQ ID NO: 10837 - DNA, 122 bp, Oryza sativa
gtgccgctgcccggtggggcccaccagccggtggaccacccctcccttttagccgccaccagtggggcccacatgccgacgccccctccctctccccttgtgccgctgccagtggggcccgc

SEQ ID NO: 10838 - DNA, 157 bp, Oryza sativa
ctaaagatgatctttagtcccggttcaaaagggtaacgggcatatttgatctttagtcccggtttgtgttaccaaccgggactaaagatcatctttagtcccggttcgaatgctgtcagggcctgtcaggcccccccgggatctttagtcccggttg

SEQ ID NO: 10839 - DNA, 187 bp, Oryza sativa
atctttagtcccggttcttaaccctaaccgggtttaaaaagaatttcaaaatagcgggaaaagatatttactcccggttggtaataccaaccgggactaaagatcatctttagtcccggttgttctcaacaaccgggagtaaatatcttttctttactcccggttgttctcaacaaccgggactaaa

SEQ ID NO: 10840 - DNA, 108 bp, Oryza sativa
ctcctcctcaggatcctgcaccgtctcctcctcatgctccgccagcaccgtctccacctcaggctccagcatcgactcctcctcaggatcctgcaccgactcctcctc

SEQ ID NO: 10841 - DNA, 105 bp, Oryza sativa
aaattcatattactacctgtcaattttttaaatcatttctagtcactacattcactaaataaactcattctacccattaaattcatattactacctgtcaatttt

SEQ ID NO: 10842 - DNA, 77 bp, Oryza sativa
tgtttcctaacgtactcgtatgaatttcgacaggcttgaaaagacatactaccctgtttcctaatgtactcgtatga

SEQ ID NO: 10843 - DNA, 109 bp, Oryza sativa
ttttctctcaaaaaataccctaaattactactagcagtagaaaatatatatcgtctcattcttcttatttccattttttttttctctcaaaagataccctaaattacta

SEQ ID NO: 10844 - DNA, 123 bp, Oryza sativa
gatttttctgtttttctttccttctctgtagttttttctgttttctgtttttctttccttcttgtaaaaatattaaccagatttttttgtttttctttccttctctgtagttttttctgtttt

SEQ ID NO: 10845 - DNA, 122 bp, Oryza sativa
aacaagcaagataaggaaacagctacggttcggatttgtcccaatcttccacagtactctgtatgggtgcagcaagaatatggcagtaacaggcaagataaggaaacagctacggttcggat

SEQ ID NO: 10846 - DNA, 103 bp, Oryza sativa
aatttgtgattcatgtaaagattgagatgaagaatttgtgattcattgtatggattgagatatataatttctttttgaaaaatctgtgattcattgtatggat

SEQ ID NO: 10847 - DNA, 83 bp, Oryza sativa
cggcctcccttccccgacctcccatccgacgcagcaccggcgggctcggtaccggcgacggcctcccttccctgacctcccat

SEQ ID NO: 10848 - DNA, 75 bp, Oryza sativa
actttcctaaagataaaaggaaaatataaagtttttatcggacactaaacacactttcctaaagataaaaggaaa

SEQ ID NO: 10849 - DNA, 81 bp, Oryza sativa
cttctatttgctcccaccaatggtgtggatggagaggagtgtgtttggttgtcatacttctatttgctcctaccaatggtg

SEQ ID NO: 10850 - DNA, 98 bp, Oryza sativa
aattcctaaattggaattaataaatattgatttgtacttgttttgtagtctagattataagtttcatgatatattaattcctaaattgtaattaataa

SEQ ID NO: 10851 - DNA, 159 bp, Oryza sativa
agccgactgccgaaaaccagccgactgccgaaagccagccgactggtgcccatgcttcggatgacaaggccgatccgagtgaccagccgccgactggaaaccagtcggcagcaactgaaactgcaacaacccaagagcccccgactggaaaccagtcgg

SEQ ID NO: 10852 - DNA, 86 bp, Oryza sativa
accgactcctcgagcccgcgcctcgagcccgcgccgctgtcgccgtcgccatcccatcgccgctgccgcgccgcgcgccgtcgccc

SEQ ID NO: 10853 - DNA, 89 bp, Oryza sativa
agcatccctaaccctaagccatggcaattgatgcagagagaatcaaggaacagatatctaatcgtagcatccctaaccctaagccatgg

SEQ ID NO: 10854 - DNA, 97 bp, Oryza sativa
gttcaattcctcatatttttctctacaacatcaaattcaaatttctgccggagtgccagtgcttctgttcaattcctcatatttttctctataacat

SEQ ID NO: 10855 - DNA, 108 bp, Oryza sativa
ggaagagataacccctcatgcctagtcaacacaaaaaaaacattaatttaaaaggggaaagagagagagaggaagagataacccctcttgcctagtcaacacaaaaaa

SEQ ID NO: 10856 - DNA, 110 bp, Oryza sativa
catcattatctagagctagtaaaattataaaatagaggtgaaaaaaaagagaaactcatagagtgcttcataccacagagatcatcattatctggagctagtaaaattat

SEQ ID NO: 10857 - DNA, 92 bp, Oryza sativa
ttgttcatttttctgccctgtttagcggagttggagttttaaatttaaattcaaacgatagagaacttgttcatttttctgccctgtttagc

SEQ ID NO: 10858 - DNA, 83 bp, Oryza sativa
atatccgattcaaatttgaatttggattatgtccgattcaaatttgaatttgaattcaaatatccgattcaaatttgaatttg

SEQ ID NO: 10859 - DNA, 82 bp, Oryza sativa
atacccgatttcaaatttgaatttgaattatacctgatttcaaatttgaatttgaattatatctgattcaaatttgaatttg

SEQ ID NO: 10860 - DNA, 68 bp, Oryza sativa; identical to SEQ ID NO: 10800

SEQ ID NO: 10861 - DNA, 97 bp, Oryza sativa
ccgccgaatctggcggaggcgaggtccggcccgccgcccctcccacccccgccgggctgcagctgcctccacaccgccggatctggcggaggcgagg

SEQ ID NO: 10862 - DNA, 144 bp, Oryza sativa
cccctcgccgcccatttgcaggcggccccccgcacagtacaaaatcgccctagcgaagggcggcaagggggccgcctgcaaaattccatgccccccctcgccgcccatttgcaggcggccccccgcacagtacaaaatcgccct

SEQ ID NO: 10863 - DNA, 99 bp, Oryza sativa
ttttttcccaagaggtagaagtacagttaagcaactcgaatccttgcatttgaatatatatgattttacttttttttcccaagaggtagaagtacagtt

SEQ ID NO: 10864 - DNA, 101 bp, Oryza sativa
aaaaactcaaaatcccttatattaggggatggagggagtatagacataaaaactcaagggagtatagacataaaaactcaaaatcccttatattaggggat

SEQ ID NO: 10865 - DNA, 99 bp, Oryza sativa
ggatgataagggtattattgtctttttcaatttttaggcttcgccatgtattctataagattcaattatatatcaggatgataagggtattattgtgtt

SEQ ID NO: 10866 - DNA, 87 bp, Oryza sativa
cgtgccgagggggcggctgggcgaggcggcagccgggcgcgacggcggcggctgggcgagcggcctggccgcgttggcagcctgggc

SEQ ID NO: 10867 - DNA, 154 bp, Oryza sativa
aaacttttctgtcacatcgttccaatttcaatcaaacttttaattttagcgtgaactaaacacagcctaagctaaacgatcaaacttttctactcacataaactttaaacttttctgtcacatcgttccaatttcaatcaaactttcaatttta

SEQ ID NO: 10868 - DNA, 136 bp, Oryza sativa
caaataaagaattactatatgttaacataaatcgtggtatgttacaagtgaatgcaggaactgaaaatatttatttttgagttgcaaataaagaattactatatgttaacataaatcatggtatgttacaagtgaa

SEQ ID NO: 10869 - DNA, 103 bp, Oryza sativa
gtcacatcctgaactcgaggagaataataagcctttctagtctgcaaatcggcacttgggattaattttaccttcgtcacatcctgaacttgaggagaataat

SEQ ID NO: 10870 - DNA, 76 bp, Oryza sativa
gttacaaacaataaataaataaataaataaatttgacgagtacctttgatattatttgttacaaacaataaataaa

SEQ ID NO: 10871 - DNA, 86 bp, Oryza sativa
ggtattctagcaacaattacatgctagaagggaccatgatatcgttaagtataacgatatagggtattctagcaacaagtacatgc

SEQ ID NO: 10872 - DNA, 85 bp, Oryza sativa
cattaccggagtaacagtcgcgcccacagtctgttgagtcggattgaatgggcggtggcggcattaccggagtaacagtcgcgcc

SEQ ID NO: 10873 - DNA, 93 bp, Oryza sativa
ccgtcgatttttatttaaattggtagacctattattttatactgttagattagatctatacttgccgtcgatttttatttaaattggtggacc

SEQ ID NO: 10874 - DNA, 104 bp, Oryza sativa
ttttttttctgattttgcatggcgcttgtgtgcgtatttttgggcgcgtatttttcgttttttcgtctgggcactccgttttttttctgattttgcatggcgct

SEQ ID NO: 10875 - DNA, 105 bp, Oryza sativa
taatcaagaggataaccttcctacaaacgcttaaaaattattgttgcaaatattttcataaagagaaaaaagtaatcaagaggataaacttcctacaaacgctta

SEQ ID NO: 10876 - DNA, 98 bp, Oryza sativa
tgcctcccctccaccggatctacaaggggagggaggggaggggccgcacgccgccggatccattgcccccatgcctcccctccaccggatctgcaagg

SEQ ID NO: 10877 - DNA, 103 bp, Oryza sativa
tgctcttaaacttcacttctaaatagctctcaaacttttattctctcctcctacctaattattaaaaagttatacatttgctcttaaacttcacttctaaata

SEQ ID NO: 10878 - DNA, 115 bp, Oryza sativa
tctcagcattcacttcgtattttgaattcttcgcattcacttccacctcctgcagaatgccattgttcagactaaaggtttgaattctcagcatttacttcgtattttgaattct

SEQ ID NO: 10879 - DNA, 117 bp, Oryza sativa
ttttattatttaattttaataaaaatactaatatttgaaatttttttaaaaaataaaaataagtcacgctaaagtgctattcatgttttatcatttaattttaataaaaatactaat

SEQ ID NO: 10880 - DNA, 203 bp, Oryza sativa
gaacgtgaacgagcgaacgaacatgaacgagaacaaggtgaatgaacgtgaacgagaacgagcgaactaacgtgaacgagccaacgaacgtgaatgagaacgagcgaacgaacgtgaacgataacgtgaacgagcgaacgaacgtgaacgtgaaatgcaattataggcagatgaatgaacgtgaacgaacaaacgtaggtgaa

SEQ ID NO: 10881 - DNA, 109 bp, homo sapiens
gcggaggcggcggagaagtgtggcggcgaaggcgggcggaggagcgtggcggcggagcgcggggaactgagccagttgtgggtggcggaggcggcggaggagtgtggcg

SEQ ID NO: 10882 - DNA, 89 bp, Oryza sativa
tacttctattgcataactaagttacttctgttgcatgtaattacttctactacagaaagttacttctattgcatagctaagttacttct

SEQ ID NO: 10883 - DNA, 70 bp, Oryza sativa
caattacggttcaaactcaattacggttgagaacataactagttaatattaatatgttaactcaattacg

SEQ ID NO: 10884 - DNA, 140 bp, Oryza sativa
ccgactggtttccagtcgggggctcttgagttgttgccgtttcagttgttgccgactggtttccagtcggcggcaggtcactcggatcggccctatcgcccgaagcatgggcaccagtcggctggctttcagtggtcggc

SEQ ID NO: 10885 - DNA, 93 bp, Oryza sativa
atattgttatatcgcccttagttgttttgttgtaatcggttgaggtttgccgatgtacaatggccaatattgttatatcgcccttagttgttt

SEQ ID NO: 10886 - DNA, 200 bp, Oryza sativa
acaaagtgtgcagaaaagacttgtgttggtctgtgaggataatcaatgacctaggcctagagcacaaagtgtgcagaaaagacttgtgttggtctgtgatatactttttcccaagttgtacaaatgaaatcccgttgccaaatgcggggtatcatttgtacaactaccgtgaactagaaaagacttgtgttggtctgtga

SEQ ID NO: 10887 - DNA, 109 bp, Oryza sativa
gccgccgcgcttgcctcacctcgccgaccgcccacgcccaccgggcccaagggcggaaggaagagtgcgctgccgccgcgctcgcctcacctcgccgaccgcccacgcc

SEQ ID NO: 10888 - DNA, 102 bp, Oryza sativa
tcagcgccagtccggttggcgctgaggtagctgccacgtcagctggggatcggcccggccgccacggtggcacaatgtcagcgccagtcccgttggcgctga

SEQ ID NO: 10889 - DNA, 103 bp, Oryza sativa
gcaaggggagccatgggcggagttcttcccacaactagcagtggcgaagctagggtcgcgaccggcgtaccggcagcggcaaggggagccatgggcgtagttc

SEQ ID NO: 10890 - DNA, 73 bp, Oryza sativa
cgtcatccgtgtttgagtcggttataaaaattgaagatgtttctgcggttcgtcatccgtgtttgagtcggtt

SEQ ID NO: 10891 - DNA, 119 bp, Oryza sativa
cgtcatccgtgtataagtcggtttttaagttcttttgcttttagaaatacatatccgtatttaagtcagtttttaagatcgttcacttttggtaatacatatatgtatttgagtcggtt

SEQ ID NO: 10892 - DNA, 91 bp, Oryza sativa
aatcctaatcctattcaaatatggccggtattgcaaacagagatttaaatatatgctcatcacaaggtaatcctaatcctattcgaatatg

SEQ ID NO: 10893 - DNA, 97 bp, Oryza sativa
ggcggccgcgcgactggaggcggcgtcgtagcaccgtagcgacatcgagctcgccgaggcggtgcgggccggggcggccgcgcgactggaggcggcg

SEQ ID NO: 10894 - DNA, 99 bp, Oryza sativa
ccggcatatcttgagattgatgaagtcaccacgatacgatcacccatgttaaatctagaatttgactgggccggcatatcttgagattgataaagtcac

SEQ ID NO: 10895 - DNA, 157 bp, Oryza sativa
ctaaagatgatctttagtcccggttcaaaagggtaacgggcatatttgatctttagtcccggtttgtgttaccaaccgggactaaagatcatctttagtcccggttcgaatgctgtcaggacctgtcaggcccccccgggatctttagtcccggttg

SEQ ID NO: 10896 - DNA, 93 bp, Oryza sativa
ccaaaaaaaactaacctagtactaggatgggacaaaaaccaacacctactccctctgtcccaaaaaaagctaacctagtactaggatgggaca

SEQ ID NO: 10897 - DNA, 119 bp, Oryza sativa
caacggcggcataataggtcagccgtgtaggcagagacaccagtcggtggcgatggaggcaggccgagggtgaagtcgtaaacgcccaacaacggcggcataataggccagccgtgtag

SEQ ID NO: 10898 - DNA, 98 bp, Oryza sativa
aacaactaagggcgatataacaatatcggccattgtacattggcaaaccacaaccgagtacaccatgaaaaacaactaagggcgatataaccatatcg

SEQ ID NO: 10899 - DNA, 219 bp, Oryza sativa
ggactaaagtggtgatctttagtcccggtttgtgacaccaaccgggactaaagatccccacccctctgacaagggactgacaggggatgaaccgggactaaagatcatcgggactaaagatcatctttagtcccggttggtgttagcaaccgggactaaatatcatagaatggctatggggttttaaaccgggactaaagatcatctttagtcccggtt

SEQ ID NO: 10900 - DNA, 127 bp, Oryza sativa
attagggtttctccccacaccaaatccctcaacgatcttgcccaagcaaaacaaaagatcaaacataatagcattggcatcatattagggtttctccccgcaccaaatccctcaacgatcttgccca

SEQ ID NO: 10901 - DNA, 100 bp, Oryza sativa
tggaggaattttaattgtaataatgacatttcatttagttcaaagtgttggtccagattactacaaactactattggaggaattttaattgataataatg

SEQ ID NO: 10902 - DNA, 186 bp, Oryza sativa
tactggttgagaaccaagagtaagtatctctcgaccttttgaagtcgaggtacgagagatcgctatgacctgctggttgagaacccggagtaagtatctcttgaccttttgaagccgaggtaggagagatcgctacgacctatactggttgagaaccaggagtaggtatctctcgaccatttgaag

SEQ ID NO: 10903 - DNA, 96 bp, Oryza sativa
agcggaacaatgtaaaacaaagtaatcggtaattgaaggagggaaaaaaagaggagcgaatatatatcatagcggaacaatgtaaaacaaagcaat

SEQ ID NO: 10904 - DNA, 186 bp, Oryza sativa
cttcaaatggtcgagagatacctactcctggttctcaaccagtaggtcgtagcgatctctcgtacctcggcttcaaatggtcgagagatacctactcctggttctcaaccagtataggtcgtagcgatctctcctacctcggcttcaaaaggtcaagagatacttactccgggttctcaaccagca

SEQ ID NO: 10905 - DNA, 133 bp, Oryza sativa
ccgtgcactgagacctactggtctccaatctctttcccagcgtgtgttaaggacgcacacacgcgtgcgcgttcagtgagactacacgttttccgtgcactgagacctactggtctccaatctcttttccagc

SEQ ID NO: 10906 - DNA, 118 bp, Oryza sativa
tactccatccgtttcacaatgtaagtcattctagcatttcacacattcattttgatgttaatgaatctagctagatatatactccatccgtttcacaatgtaagtcattctagcattt

SEQ ID NO: 10907 - DNA, 131 bp, Oryza sativa
ttcgctcgttcacgttctcgcggcaacgtacgttgacgtgttcgttctcgctctcgttcattcgatcgttctcgttctcgttcacgttgtcgcggcaacgtacgttgacgtgttcgttctcgctctcgttc

SEQ ID NO: 10908 - DNA, 106 bp, Oryza sativa
gcgggctcgacggccggcgccctccccctcctagatccagtggcggcgcgctcgggaggggccgggagcggccacggcggcgggctcgacggccggcaccctcccc

SEQ ID NO: 10909 - DNA, 75 bp, Oryza sativa
gcggcggcggcggagcgagccggccgcgcggtggacgggtggcggcggccgtgcggcggcggcggagcgagccgg

SEQ ID NO: 10910 - DNA, 108 bp, Oryza sativa
acggaggagtagatgtaggagcccgaggaggagtcggtgcaggatcctgaggaggagtcggtgctggagcctgaggtggagacaatgctggcggagcatgaggaggag

SEQ ID NO: 10911 - DNA, 96 bp, Oryza sativa
aatctcataaaacattcatcacataatcaaacacaagaagagggaaaatctagaggaaaaatttgcaaaaggaaatctcttaaaacattcatcaca

SEQ ID NO: 10912 - DNA, 90 bp, Oryza sativa
tggaaacagtcttgacgacaaggacgtattcgatgtgagcaaaataatgggtaccgaattcatggaaacagtcttgacgacagggacgta

SEQ ID NO: 10913 - DNA, 97 bp, Oryza sativa
agctgaaactgtttggctggagctgtgtcaaacaagcacttaaagtctataacttcgcttctattttaagtgtagctgaaactgtttggctagagct

SEQ ID NO: 10914 - DNA, 93 bp, Oryza sativa
gatctatcttaacttccctgttggatggcatcaatggcatgtttggctgtatcaatggcaactgggctctgatctatcttaacttccctattg

SEQ ID NO: 10915 - DNA, 83 bp, Oryza sativa
tttctggagattagttaaatcacttggtccttttttaccgcatgcatgcgcgcgtgtttctggagattagttaaatcatttgg

SEQ ID NO: 10916 - DNA, 105 bp, Oryza sativa
cttgacaagggtgtgtaatcacctattatttatgcatagtatctcctccggtgcgtgaaaccggtcttgacaaggatgtgtaatcacctattatttatgcatagt

SEQ ID NO: 10917 - DNA, 140 bp, Oryza sativa
gatctttagtcccggttggtgacaccaaccggactaaagatcatctttatagtcccggttgataatactaaccgggactaaaaattattttgatctttagtctattttgatctttagtcccggttagtattaccaaccga

SEQ ID NO: 10918 - DNA, 115 bp, Oryza sativa
attttaataataggtaaaggttacgaaaaatcagtaaactaatgtcacaacggacgaaaaggtgggtgcctacataatcatcttaaattttaataataggtaaagattacgaaaa

SEQ ID NO: 10919 - DNA, 82 bp, Oryza sativa
tgaaaaattcgctcccatggggagttgaatccagggctgcacaaagccattaaattctgaaaaattcgctcccatgaggagt

SEQ ID NO: 10920 - DNA, 108 bp, Oryza sativa
gataaaaacaacttccctgctccccaccccaccgcacgtcctgccatcctgcttccaccattatcggagtaaacaatttacttcgataaaaacaacttctctgctccc

SEQ ID NO: 10921 - DNA, 75 bp, Oryza sativa
actttcctaaagataaaaggaaaacataaagtccttataggacactaaacacactttcctaaagataaaaaggaa

SEQ ID NO: 10922 - DNA, 168 bp, Oryza sativa
ccggcccgccgcctccacgccgtcctagccgcagcgccgccggatgtggcggaggcgaggtccggccggccgcctccacgccgtccgacccgccgccgcacctctcctccccctcgatctagcggaggggagggcgtcgccggccctcccgccgccgccacacagaga

SEQ ID NO: 10923 - DNA, 110 bp, Oryza sativa
gaagcctccatctttgcaaactcttctcctatatgacattattgtatcaaggactaagacggagtctggggaagcctccatctttgcaaactcttctcctatatgacatt

SEQ ID NO: 10924 - DNA, 142 bp, Oryza sativa
tgatgtacttgtcattttcagaatttagctctagtactaatgtaaaagcttagtgtacgattaatttagttggcaaatttttgtgtattgttgatgtacttgtcaatttcagaatttagctctagtactaatgtaaaagctt

SEQ ID NO: 10925 - DNA, 111 bp, Oryza sativa
gaatatacatggctgggcacctcctggctaggtgagatcaaagtgacgaagagttgacaaagacggttggtgtagatggcagccggaataaacatggctgggcacctcctg

SEQ ID NO: 10926 - DNA, 108 bp, Oryza sativa; identical to SEQ ID NO: 10840

SEQ ID NO: 10927 - DNA, 127 bp, Oryza sativa
acccgattgagataacattccatatctcaaatgggcatgaagttggggcccgtcacaaatgaccatcatctgtgacgggcaccaactttatacccgattgagataacattccatatctcaaacgggc

SEQ ID NO: 10928 - DNA, 100 bp, Oryza sativa
tttcttactttttaattctgaatttccattttctctattgtataccggtctggactctagtcttctcttcatatatttcttatttttaattctgaatttc

SEQ ID NO: 10929 - DNA, 94 bp, Oryza sativa
tctcaatataacaattctcttacgtaacatagttgacacttgactgcaatggcataaaagaaatcatctcaatataacaattctcttacgtaac

SEQ ID NO: 10930 - DNA, 126 bp, Oryza sativa
ctctctccactctcgatccctcctcccacctctcccactcaagagggagggagatgtagagggggccgtcctctcctagctctctctctctctctccattctcgatccctcctcccacctctccca

SEQ ID NO: 10931 - DNA, 95 bp, Oryza sativa
tcataggggtgagtgtgcgtgagttgcgtcaatctctccaggatttaccggcccagtctttaaagatgttcataggggtgagtgcgcgtgagttg

SEQ ID NO: 10932 - DNA, 104 bp, Oryza sativa
gattaattaaactaataaagcagggttaatctctcttactgattaattaatcaatccacgtgaaagacgacgattaattaaactaataaagcagcgttaatctc

SEQ ID NO: 10933 - DNA, 119 bp, Oryza sativa
aaaaacatttctaaaagaaccaacccacgagagaaaagagaagtaacccatgagagagaagaactgaaaaacatttctaaaaaaacatttataaaagaaccaacccacgagagaaaaga

SEQ ID NO: 10934 - DNA, 83 bp, Oryza sativa
acacccgcccactaacatatatgagaagaacgatgatcgacacaaatttgtatcgcacaccagcccactaacatatatgagaa

SEQ ID NO: 10935 - DNA, 89 bp, Oryza sativa
aaacagtgaagaactaactatcaagttaacaagtctacatgacatgagagatgatgtagactaaacagtgaagaactaactatcaagtt

SEQ ID NO: 10936 - DNA, 103 bp, Oryza sativa
atataaatgaagacacaatattgtcccgggttatattcatttaaatgaaaactggattgttactatcttatgtattcatatatatatgaagacacaatattgt

SEQ ID NO: 10937 - DNA, 91 bp, Oryza sativa
cccataaggtccatagtttgtttcctttctcaattaatttcacgggtgcacagagattaggcccataaggtccatagcttgtttcctttct

SEQ ID NO: 10938 - DNA, 101 bp, Oryza sativa
gctggacaggtcaagatcccatctagagaaatgaatttggtgagtactaaatttagtactttttaagctggacaggtcaagatcccgtctagagaaatgaa

SEQ ID NO: 10939 - DNA, 126 bp, Oryza sativa
attcagcaatgaaatgaatgagatattgaagtggcctacatatgtcattacaaatataaaaacatgtttccttatatatgccgctatctatcgattcagcaatgaaatgaatgagatattgaagtg

SEQ ID NO: 10940 - DNA, 103 bp, Oryza sativa
aagataaatctaatattcgaatatagtggatcagtgtgggagaggaaaaagacgtgaattgtggagtccttttaaagataaatctaatattcgaatatagtgg

SEQ ID NO: 10941 - DNA, 95 bp, Oryza sativa
ctccggcgccagcagactggcctctgacaagaaccacctaatttcaaaaagaagaaataaaaaccgcacaactccggcgccggcagactggcctc

SEQ ID NO: 10942 - DNA, 118 bp, Oryza sativa
aaatttgcaatggcatgatccaaaatgaccgacagacacacgtacgtacgtacatgcatgtatttttttaatacaataaatttgcaatggcatgatccaaaatgacagacagacacac

SEQ ID NO: 10943 - DNA, 141 bp, Oryza sativa
cgccgccgacgtgccgacccgtcggagcgcggcctcgccgagccgcgggtttgtcgcgaccgttccaggtgagtatctccaccagccggtccaccatcgccgccgacgtgccgacccgccggagcgcggcctcgccgagcc

SEQ ID NO: 10944 - DNA, 75 bp, Oryza sativa
aatccagtggcgcgcgaggaggccgatggacagcaacgacgatagcggcaaatccagcggcgcgcgaggaggccg

SEQ ID NO: 10945 - DNA, 83 bp, Oryza sativa
tgctcaaaccaataaccatagatgatacatgtaagaaaattcgggactgactatagagctgctcaaaccaataaccatacatg

SEQ ID NO: 10946 - DNA, 97 bp, Oryza sativa
cctctcctatactatccaacatggtatcccccgaggctcaatacaatgagtcccacgttacgcagtatacctctcctatactatccaacatggtatc

SEQ ID NO: 10947 - DNA, 97 bp, Oryza sativa
cctctcctatactatccaacatggtatcccccaaggctcaatacaatgagtcccacgttacgcagtatacctctcctatactatccaacatggtatc

SEQ ID NO: 10948 - DNA, 96 bp, Oryza sativa
gggaatactgaaacatatacacacaaccaaaatcccatccggaattccatcatacaaattgaataggagagggaaaactgaaacatatacacacaa

SEQ ID NO: 10949 - DNA, 136 bp, homo sapiens
tttttttaaaaaagaaagacatgtgattgttttctattttttaaaagtaatttattttgtcggtaaataattcattttgttggtgatcacatggtttttttaaaaaagaaagacatgtgattgttttttatttttt

SEQ ID NO: 10950 - DNA, 97 bp, Oryza sativa
aatgtagagtacaattatatctaatagaaatcgatgcaaatagttgttaaaaattctgaaaaatattgataatgtagagtacaattatatctaatag

SEQ ID NO: 10951 - DNA, 84 bp, Oryza sativa
ctgtgtcatcccggtccctaaacttgcagaacactcatttaggtcttccaacttattcagttgtgtcaccccggtctctaaact

SEQ ID NO: 10952 - DNA, 107 bp, Oryza sativa
tatgcttacatgttgagctttatgtatttaatagattgatgtggcatccttgcatgtaggttttaggaatgctaataaatactatgcttgcatgttgagctttatgt

SEQ ID NO: 10953 - DNA, 105 bp, Oryza sativa
aaattttaataaataaattaatataattttttaaaacaactttcatatatatatatatatatatatatatatatatatatatatatatatatatatatatatata

SEQ ID NO: 10954 - DNA, 137 bp, Oryza sativa
tttttcaacacaacaaaaaaataccattttttcttttttttaacattagcaaatcattacttttttaaaaaacttttatttccattttttaaataccattttttcattttttaacattagtaaatcattactttttt

SEQ ID NO: 10955 - DNA, 95 bp, Oryza sativa
aaatcaggcatgaaagggagcgacatatatatagtattaaggctatgtttagttcacgccaaaaaaatcaggcataaaagggagcgacatatata

SEQ ID NO: 10956 - DNA, 68 bp, Oryza sativa; identical to SEQ ID NO: 10800

SEQ ID NO: 10957 - DNA, 99 bp, Oryza sativa
ctgtggtaacaaatccccaattttcattgggtgtaacagcaagcttatcttaataaatcattctaaactgtggtaacaaatccccaattttcattgggt

SEQ ID NO: 10958 - DNA, 98 bp, Oryza sativa
agttagaataaatttgcacaactacaaatctttcaggaaaaaaatgaggtagattgaaaaaataaatgatgcagttagaatatatttgcacaactaca

SEQ ID NO: 10959 - DNA, 111 bp, Oryza sativa
atttttttcgctatttattttgttttcacgggagtcggacctgagatgagagggagtcggacattttttttatttttttcgctatttattttgttttgacgggagtcggac

SEQ ID NO: 10960 - DNA, 128 bp, Oryza sativa
gacacgtagacctaattttacgtgggaagggtacaccaactttttatttttgcacgggaaactacatgttaattcattttagcatgggaagtgacacgtagacctaattttacgtgggaatggtacac

SEQ ID NO: 10961 - DNA, 87 bp, Oryza sativa
acagtattgtcgcgatttcgactaacgtagtagtgagtggccctatgtggtgtcccaggacagtattgtcgtgatttcgactaacgt

SEQ ID NO: 10962 - DNA, 99 bp, Oryza sativa
cagtgtgcctcgatctactctctgtacgcatagtaaattgttggcttaggaggcatcaggagctccggtaacaccatagtgtgcctcgatctactctct

SEQ ID NO: 10963 - DNA, 157 bp, Oryza sativa
atccaacatttggttccttgaggtaccacaaatattcgttatctcgaggtactttatagtgtaaaatttggcacctctagtgcaaaatgtggtacctcaaggtgcttagtatctcaaggtatcagaactttgtgtgcaaaatgtggtacctcaagtt

SEQ ID NO: 10964 - DNA, 104 bp, Oryza sativa
tgatggttgtgtagtggatgatggttcatggctagttgatgacaattagttgctctattcctcttcctattacattggtgatggttgtgtagtggaggatggtt

SEQ ID NO: 10965 - DNA, 76 bp, Oryza sativa
cccccgactggaaaccagtcggccgaagccgaagccggatttaatcaggagcccccgactggaaaccagtcggacg

SEQ ID NO: 10966 - DNA, 97 bp, Oryza sativa
tcatcatccaagattcaagaagacgagacaggcaaagaagaggaagaattctgttcaattgcaattgatttcatcatccaagatccaagaagacgag

SEQ ID NO: 10967 - DNA, 103 bp, Oryza sativa
ccaaaagagcctattattagtctttaatccatgattattttctaattgtaagatttctataattcgctccccaaaaggagcctattattagtctttaatccat

SEQ ID NO: 10968 - DNA, 101 bp, Oryza sativa
gaacgaaacagagtgtcatgcatgggtcgttgaatgaaaaggtaaaactccctaaattgtgtttatgcatgggtcgttgaacaaaacagagtgtcatgcat

SEQ ID NO: 10969 - DNA, 89 bp, Oryza sativa
agattcgtaattatagaaaatatcatagatttatggatctggacagataacctatacagattcgtagttatagaaaatatcatagattt

SEQ ID NO: 10970 - DNA, 96 bp, Oryza sativa
ttagatatagttaagtagtagatgcctaaggattgtctcagcatagcacatacccataattagttagatatagttaagtagtagatgcccaaggat

SEQ ID NO: 10971 - DNA, 90 bp, Oryza sativa
tggaacatataggtaattcactggaggacaaacgagtaaggaccaacaagcaaaaaagatttgcatggacatataggtaattcactggag

SEQ ID NO: 10972 - DNA, 108 bp, Oryza sativa
cggcccgtcacaggtgaggggataccagtgatgggttgggaggaaaacccgtcacttcctcacctgtgacggcttttccttccggcccatcacaggtgaggggatacc

SEQ ID NO: 10973 - DNA, 75 bp, Oryza sativa
gcctccatgtccgccaccgccgcctccaccatcaggggcagctacctcgttgcctccatgtccgccgccgccgcc

SEQ ID NO: 10974 - DNA, 94 bp, Oryza sativa
ttcataagtttcaaggtatgccagcccagttttcggaggtacacaaaggggtgtggtggtttcataagtttcaagttatgccagcccagttttc

SEQ ID NO: 10975 - DNA, 87 bp, Oryza sativa
ccctccctcccagatctggccggagaggggcgggggaagagcggtggccggcggctcccggtccctccctcccagatctggccgaag

SEQ ID NO: 10976 - DNA, 132 bp, Oryza sativa
aaccgggactaaagttacgatcttaagtcccggttggtgttaccaaccgggactaaagatcccgggggggcctgacaggccctgacagcattcgaaccgggactaaagttacgatctttagtcccggttggt

SEQ ID NO: 10977 - DNA, 114 bp, Oryza sativa
tcatatgatcatttgcgttcttttggtcagactttgcgaagaaactctggatcatagtagtttctcctataccctgcattgcctcatatgatcatttgtgttcttttggtcaga

SEQ ID NO: 10978 - DNA, 94 bp, Oryza sativa
tagtctgttactgcacttctggcatggctgtagaagtgcagtaacatgatatgttactgcaaaacttgtagcctgttactgcacttctggcatg

SEQ ID NO: 10979 - DNA, 76 bp, Oryza sativa
tgtagcacggtatatgcaacaattcacaaaaattatcttccagtttattagttgtagcacagtatatgcaacaatt

SEQ ID NO: 10980 - DNA, 98 bp, Oryza sativa
ataattaacatcattgtaaactaccccaatgaatgtcaaatcccaaatgattaatgcagtaaaataatgccaaataattaacatcattgtgaactacc

SEQ ID NO: 10981 - DNA, 85 bp, Oryza sativa
catgttcatccatatccttgtgagtagaagagcaagaagccaagaaccaaatgaagctccatgttcatccctatccttgtgagta

SEQ ID NO: 10982 - DNA, 90 bp, Oryza sativa
tcctgctgatcatgccactcctgttaacttcaggtaataacattcacaaactcataacctatgcaactcctgctgatgatgccactcctg

SEQ ID NO: 10983 - DNA, 83 bp, Oryza sativa
ttatattagtcaacctgcatgggaataaaaaacaaagaactcaataattggcaagttatactagtcaacctgcatgggaataa

SEQ ID NO: 10984 - DNA, 84 bp, Oryza sativa
ctgtgtcatcccggtccctaaactcgcaaatcgaccgtttagatcctcaaacttgttcgactgtgtcatcccggtccctaaact

SEQ ID NO: 10985 - DNA, 106 bp, Oryza sativa
gggaatctcggccgttcgattcagatccaacggtcaggaatcttcgtctgcctgataccagtccacacacagccccggagggaatctcggccgtccgattcagatc

SEQ ID NO: 10986 - DNA, 222 bp, Oryza sativa
ggtggccggcggcccgtgtggcgggaagaagacagctggacgacgacgtgcgcggcggggagggcggcgcgcgcggtgggagggcgacgcccgcgcggcaggaagaagacggctggacgacgacgcgcgtagcgggagggcggcgggacagctggacgacgacgcgcgcggcgggagggcgacgcccgcgtggcaggaagaagacggctggacgacgacgcg

SEQ ID NO: 10987 - DNA, 101 bp, Oryza sativa
gaaagaaaatgagatcattacagaacttgatcaaactcgaacttaattcctctctgtcgcgaaggaaagaaaatgagatcattacagaatttgatcaaact

SEQ ID NO: 10988 - DNA, 154 bp, Oryza sativa
gtcgccaccagctcccctcccgctagatccggtggaggggaggggcgccgccgccgcctcccctcccgctggatccggcggagaggaggggcgccgctgccgctgggacgccggcgagccgccggcgcctcccctcccgctggatccggcggag

SEQ ID NO: 10989 - DNA, 122 bp, Oryza sativa
aaaaaatgtttgtcaattttacctaaagaataatatccggttgaatgtaaaggccgggtaaaaaatatccttctctaaaaaaataaaaaaaatatttgtcaattttacctaaagaataatat

SEQ ID NO: 10990 - DNA, 93 bp, Oryza sativa
aacattttcaacttttactattaatagcaaaaaaaataaaaaagatcaatcatttaaaattgatgttgactagattttcaacattttcaactt

SEQ ID NO: 10991 - DNA, 71 bp, Oryza sativa
acaccagccaccgcgcccgtgggagctgtccacgacgccggcgacgccacaccagccgccgcgcccgtggg

SEQ ID NO: 10992 - DNA, 117 bp, Oryza sativa
ggaaagtagacttattctaggatgggcccatagacatagtgccagcaataataggtgaaaaatgcgggagatttgacacgagggagggaaagtagacttattctaggaggggcccat

SEQ ID NO: 10993 - DNA, 109 bp, Oryza sativa
ttgtagttctcatatcttttttcaatgtgagacggattctaagaatggctttaattttatatttcagcccataacatttttttttgtagttcttatatcttttttcaat

SEQ ID NO: 10994 - DNA, 109 bp, Oryza sativa
atcataatcgattgtgctttgccgatgtatgatggtcgatataagttatatcgcccttagcagttttttttcttatcataatcggttgtgctttgccgatgtatgatgg

SEQ ID NO: 10995 - DNA, 95 bp, Oryza sativa
tttggagcatcttcgctaggggcctccttcgcctcttcagcaggctttgtctctacatcagtctcctttggagcatcttcgctaggggcctcctt

SEQ ID NO: 10996 - DNA, 106 bp, Oryza sativa
catgtcatagccaggatcaaccactgtatatatgcaggcatctaaatcatatatatatatatatatatatttccgcatgtcatagccaggaccaaccactgtatat

SEQ ID NO: 10997 - DNA, 106 bp, Oryza sativa
taacagatttattaagttagttttttcatactatatatgaaaacagctccagagaagaggcaaagggtaccttcagcctataacagatttattaagtgagtttttt

SEQ ID NO: 10998 - DNA, 114 bp, Oryza sativa
aaaatttctcatcattatataactgcatagacataaatttcatcggaatacaattaatgcagtacaggagaatgcgtgcatgctagaaaatttctcatcatcatataactgcat

SEQ ID NO: 10999 - DNA, 76 bp, Oryza sativa
aagcctaattaatccgtcattagccgtcagtaagcctcgagacgaatttattaaacctaattaatccgtcattagc

SEQ ID NO: 11000 - DNA, 75 bp, Oryza sativa
gacgacgagggagtcacccgcggcgtcagaaactcttcaatcctaggagagacgacgagggagtcacctgcggcg

SEQ ID NO: 11001 - DNA, 75 bp, Oryza sativa
cgccacgggtgactccctcgtcgtctctcctaggattgaagagtttctgacgccgcgggtgactccctcgtcgtc

SEQ ID NO: 11002 - DNA, 275 bp, Oryza sativa
ctgcatggttgattatatatatatatatatatatatatatatatatatatatatatatatatatatatatatatatttgtgtgtgtgtgcgcgcgcgcgcacgtatgtatatatgtataaatacatatattatacacatatttataatttaaagaacttaacattttatgtacatatatgttaccaaaatatatattaacactaaagtaaatgtatgtacatatataaatatatatatatatatatatatatatatatatatatatatatatata

SEQ ID NO: 11003 - DNA, 100 bp, Oryza sativa
gtgatgtgttgttaatcttctgcatccgattcgttttgatttgccactcctagctacttgtgaattccgtgatgtgttgttaaacttctgcatccgattc

SEQ ID NO: 11004 - DNA, 84 bp, Oryza sativa
aaatcccatgcaagcatgccacatcttccctcactagaaattactattctagcatattttaaatcccatgcaagcatgacacat

SEQ ID NO: 11005 - DNA, 91 bp, Oryza sativa
tagttcactcgaaattgacgcttcagaaaccaactggacagccaaaatattgcaagtgaaacacatcttagttcactcgaaattgacgttt

SEQ ID NO: 11006 - DNA, 79 bp, Oryza sativa
agcgccgcgccgagcgccccctccctttcccctcgctctgcccgcgcgtgcggaagcgccgcgccgagcgccccctccc

SEQ ID NO: 11007 - DNA, 101 bp, Oryza sativa
ttgcatattgtgataatttatttaatgataaatctagtaacatcaattttacataattgcaattttaaataaaaagatttgcatattgtgataatttattt

SEQ ID NO: 11008 - DNA, 84 bp, Oryza sativa
atttaaaatactctagataataattaccagtgggtgataatgtggcacgcttgcatgtgatttaaaatactctagataataatt

SEQ ID NO: 11009 - DNA, 83 bp, Oryza sativa
tttaaaatactctagataataattgctattgggtgatgatgcggtacacttgtatgtggtttaaaatactctagatgataatt

SEQ ID NO: 11010 - DNA, 101 bp, Oryza sativa
gtagttttaaggttacaatgttttcaaattcaccgctacatcctttgaagtaaataagcatgtaacaaccataaagtagttttaaggttacgatgttttca

SEQ ID NO: 11011 - DNA, 102 bp, Oryza sativa
gacgacctagagacctccgccggtgccgcgccgccgcggcctcctcctcgatgcggcgcagccggggctgctccatcgggacgacctagagaccttcgccgg

SEQ ID NO: 11012 - DNA, 145 bp, Oryza sativa
tgtgcctaagctggttgtaagtgctcatctctctcctctcctctctcatctaaatatatggtccacatgtctgtctcacaaattttcttggttcatgtgcctaagctggttgtaagtgctcatctctctcctctcatctctcatc

SEQ ID NO: 11013 - DNA, 126 bp, Oryza sativa
atagccgatgtattcacatcgccttgagatggccgatattgttatatcgccctttgttgtttttcatattgtaatcggttgtggtttgccgatgtgcaatggccgatattgttatatcgcctttgg

SEQ ID NO: 11014 - DNA, 74 bp, Oryza sativa
actttcctaaagataaaaggcaagataaagtctttataggacactaaacacactttcctaaagataaaaggaaa

SEQ ID NO: 11015 - DNA, 113 bp, Oryza sativa
aaaatcaccaaagagcttaacactgtcaaagtgcttttgacttaattttccacaagttactgtaaatcctactactttcattcctaaaatcaccaaagagcttaacattgtca

SEQ ID NO: 11016 - DNA, 76 bp, Oryza sativa
ctttcctaaagataaaaggaaaacataaagtccttatcggacactaaacacactttcctaaagataaaaggaaact

SEQ ID NO: 11017 - DNA, 892 bp, Oryza sativa
taacgttcgtcctcgttcgttcgctcgttctcgttcacgttcgttcgcttgttctcattcacgtccgttccctcgttctcgcttgtcttcgttcgatcgttctcgttctcgctctcgttcgttcgatcgttctcgttctcgttcacgttctcgcggcaacgtacgttgacgtgttcgttctcgctctcgtccgttcgatcgttctcgttctcgttcgttaacggcggtgtggcggcatcggggcggcggttggcgcggcggcgtggcgacggcggcggcggcgtggcgttgcggggccgtggcggcggcggcgtggcgtgccggcggcggcattgcgcgcgcgccggcgaaggcggcggcgtggcgtgccggcggcggcattgcgcccgcggcggcgaagacggcggcatggcgtgccggcggcggcttggcgcggcgtcggcgtggcgcgtcgtcgtcgtggcgcggcgtctcgtggcgggcggcgcgacggagagagatcgagatcggagagatcgagatgaagggagatcaggcggcggcggctctcaccccagagatgcggcggcagcggaggaggcggagggggcggcgaggacgacgagctcgagacgacggcgagatatggcggcgtcggcgcggggatttgccctaggcagtggcggcgaaggagagaggccgagagagatcgatcggccgaaaacgtctaagtgttggtgaagaagacgagggcgcaccgggaatatatatatatatatatatattgcatttcacgttcacgttcgttccctcgttctcgcttgtcttcgttcaatcgttctcgttctcgctctcgttcgttcgatcgttctcgttcacgttctcgcggcaacgtacgttgacgtgttcgttc

SEQ ID NO: 11018 - DNA, 68 bp, Oryza sativa
gaaccgggactaaagatgatctttagtctcggttggtaacacaaaccgggactaaagatcaaatatgc

SEQ ID NO: 11019 - DNA, 152 bp, Oryza sativa
gtggtaggcgacgtatccatcgacagcgaggcgtctgtggtaggcaacgtacccgtcgacagcgaggcgcctatactgtgatgctcataggcgctagctttcagtggtatcttttagtggtaggcgacgtacccgtcgacagcgaggcgcct

SEQ ID NO: 11020 - DNA, 157 bp, Oryza sativa
ctaaagatgatctttagtcccggttcaaaagggtaacgggcatatttgatctttagtcccggtttgtgttaccaaccgggactaaagatcatctttagtcccggttcgaatgctgtcagtgcctgtcaggcccccccgggatctttagtcccggttg

SEQ ID NO: 11021 - DNA, 79 bp, Oryza sativa
cgctaattttaatcagtttaatgcacagagatatggtaagggattataacactgcgctaattttaatcagtttaatcca

SEQ ID NO: 11022 - DNA, 91 bp, Oryza sativa
gactgttcgagctaggcctacagctgtatttgtgggctgagccgaagagtggtaggcctggcatgggactgttcgagctagggctacagct

SEQ ID NO: 11023 - DNA, 88 bp, Oryza sativa
cccaacttatcatcgaattaaaaaatagtccccctaccgcaaaatcggatacaacgccaacaacccaacttatcatcgaataaaaaaa

SEQ ID NO: 11024 - DNA, 96 bp, Oryza sativa
cttttaattaggagatgatcagctagatacacattgatgttagaattacagatcaaatttactaccttttaattaggagatgatcagctagataca

SEQ ID NO: 11025 - DNA, 133 bp, Oryza sativa
aaattgctccaccctaagagcgcttaacctcaaagttctttggtgaccgcgggccggtcttttcttcccgatcggtcactcatcccaaaattgctccaccctaagagcgcttaacctcaaagttctttggtga

SEQ ID NO: 11026 - DNA, 82 bp, Oryza sativa
aatttttgaaaccaaattaaaggaacttacgtgagaattaaagtaacgtacatgagaatttttgaaaccaaattaaaggaac

SEQ ID NO: 11027 - DNA, 86 bp, Oryza sativa
gtgtttcatatgaagagataaatgacagaacaaacgtatgtttattctttggcctcattgacgtgtttcatacgaagagataaatg

SEQ ID NO: 11028 - DNA, 110 bp, Oryza sativa
ccgccgcctcctccacaccatcaccgcccctcaatccatcctcgcgcctccctcgaccgccgcccctctgctgtcgtcgcatcccgcctcctccacaccatcgccgcccc

SEQ ID NO: 11029 - DNA, 83 bp, Oryza sativa
cactagcaattactattctagcccatttaaaatcccatgcaaacatgtcacatcttcactcacttgcaattactattctagcc

SEQ ID NO: 11030 - DNA, 214 bp, Oryza sativa
ccggttggtgttaccaaccggggctaaagatccccgggatctttagccccggttggtaacaccaaccgggactaaagttacgatctttagtccggttggtgttaccaaccgggactaaagatcccgggggggcctgacaggccctgacagcatttgaaccgggactaaagatcaaatatgcccgttaccttttttaaccgggactaaagatcat

SEQ ID NO: 11031 - DNA, 106 bp, Oryza sativa
gaggccgaggccgaggccttggtctctagcaagtgagcggagcacgatgagatcgggaggaggaggacatgagatggagagagagggcgaggccttggtctctagc

SEQ ID NO: 11032 - DNA, 104 bp, Oryza sativa
aggaaatggagatgtaccgtcatctcacgtgccactccacatactttcggtagattcctcatatgcaattcaactaggttaggaaatggagatgtaccgtcatc

SEQ ID NO: 11033 - DNA, 102 bp, Oryza sativa
tcagcgccagtcctgttggcgctgaggtagctgccacgtcagctggggatcggcccggccgccacggtggcacaatgtcagcgccagtcccgttggcgctga

SEQ ID NO: 11034 - DNA, 143 bp, Oryza sativa
aagaaaatattcatatcaaaagatctctgttgtgcgtaacaaagcctagataataagataagaaaatattcttatcaaaagattcatgctgtgagtaacatgcaagttatagtatgagcaagcaaacaatagtatgaaatgag

SEQ ID NO: 11035 - DNA, 81 bp, Oryza sativa
ccttaattagttccttttcaattttaactttgcatcatctacaatcctctcatctgcccttaattagttccctttcaattt

SEQ ID NO: 11036 - DNA, 133 bp, Oryza sativa
ttctgtttgatatgctaagttcctaattttaaaaaggcattcaagttcctaaaaaaggctgcatatatccatttaaaaggtattcaaatccaattctgtttgatatgctaagttcctaattttaaaaaggcat

SEQ ID NO: 11037 - DNA, 99 bp, Oryza sativa
tcgaccaaattatcacaaaaaagtacatggaattaggagtgtgtggttcatggattgcaatttcggaatacttcgaccaaattatcacaaaaaagtaca

SEQ ID NO: 11038 - DNA, 87 bp, Oryza sativa
atttatagaggttacagagcaaaagccggccgaaatttaataagtaggagggtgaaaacagagatttatagaggttacagagcaaaa

SEQ ID NO: 11039 - DNA, 79 bp, Oryza sativa
gctgcataacagatttgagaagtggctcaatatatagttctcaatatatatagctgcataacagatttgagaagtggct

SEQ ID NO: 11040 - DNA, 410 bp, Oryza sativa
caggaccgcttacatatgacagctttcataggtcatatactatgaaacgttttatgacctattttaagtgactacatatggcagctttcatgtcctcccagagagacacaagtcttttatgcacactatatatgacagctttcatagtcttttatgcacactacatatggcagctttcataggtcaagtcttttatgcacactatatatggcagctttcatagtcttttatacacactacattatgcacactacatatggcagctttcataggtcacatgtcctcacttgtgcgcacccgggaggtcttttatgcacactacatatggcagttttcataggtcatatactgtcctcatagagacacacaagtcttttatgcacactacatatggcagctttcatgtcctc

SEQ ID NO: 11041 - DNA, 80 bp, Oryza sativa
tccctggagagagagggagagggaaatgccacattggagatttttatgcccaaaatgtccttggagagagagggagaggg

SEQ ID NO: 11042 - DNA, 118 bp, Oryza sativa
tttcttttataaacgggattttttataatctgtgttttttcggttttttatctagtcgggtggttttttcgaatcgatttcttttataaacgggattttttataatatgtgttttttc

SEQ ID NO: 11043 - DNA, 101 bp, Oryza sativa
cataagttaatgcccgtcacagatgactcatctgtgatgggctagtcatctgtgatgggctagtcatctgtgacgggccatagttaatgcccgtcacagat

SEQ ID NO: 11044 - DNA, 87 bp, Oryza sativa
tttggctgataagtataagtataaacgaaaagcagctccaaatttaaggttgaaaatttaatttttgactgataagtataagtataa

SEQ ID NO: 11045 - DNA, 108 bp, Oryza sativa
tatacagactaaatcagtatatggacaaaattaccatgttacaactcaggattatcaaaacaaattaccatgttacaactattatacagactaaatcagtatatggac

SEQ ID NO: 11046 - DNA, 87 bp, Oryza sativa
tgtaaatttggtacctcatggtacctaggtactatgaggtaccatgaggtaccaaaattttagtgtaaattttggtacctcatggta

SEQ ID NO: 11047 - DNA, 102 bp, Oryza sativa
caattgatcaagtaggaaatccaaaattagttgggcaggcaaggttaattagaacaattgtgacactcacctccttacaattgatcaagtaggaatccaaat

SEQ ID NO: 11048 - DNA, 110 bp, Oryza sativa
cggacagcagatggatgggaaaaaatcggcaccggcagaggcatggatgcggggcgagcgcgccgtttctccagtaccgcgaccacggacggcagatggatgggaaaaaa

SEQ ID NO: 11049 - DNA, 90 bp, Oryza sativa
aatttggccatctctgcatctgcattacactctgaaactgaaagaataaagaattcagggcataatttggccatctctgcatttgcatta

SEQ ID NO: 11050 - DNA, 126 bp, Oryza sativa
caaccgggactacaaatagatctttagtcccggttggtaacaccaaccaggagtaaagtttatggcgatctttttttccggttaatgttatcaaccgggactacaaatagatctttagtcccggtt

SEQ ID NO: 11051 - DNA, 963 bp, Oryza sativa
aaaccgggagtaaaaatctatttttagtcccggttggtaaagataaagcatctttagtcccggttggtgttaccaacctggactaaagaggctaatccggttgctctttccggttcctctttattattttcttttcttcattatttttaaatatattgatttcaccccattccatccccaaaatcccaaatcaatcatcctcaaattgcctccaaatccacaaatcgatcatctcaaatactcaaatacatcacaaaatcttaaaaaaaaattacatcacaacttctacaaaattcatcacatattcacatcacacacaaatcaaatacatcacataacaatctcagatccaatcaaatacattcacacaacaatctcagattctgcaaaaaaaaagaaaaagaaaaaaaaaaggagaagacgcgcggcgaggcaccgccgccgcgccggccggccggccggccctccctccgcgccctgccgccagctgccgccgcaccgccgtgcggctgccaccgcgccgccgtgccggccggccggcccaccgcgccccgccggccgccgcctcaccgcgcaccgcgccggccggccggccctccgcgacccgctgccctcgcgccggcttggcagtagcgaggagaaggagaggagaagaagaggagaggaatagagataagaatgagaagaggagataaggttgaagagatgagttaaaaatgagaggaggagataaggttgaggaggagagaggagttaaaggagaggaggaggtacctcgatccgatcgtgcacacctctccgatctccgcgtcgatctttactcccggttggttttaccaaccgggactataaatagatctttagtcccggttagtgttaccaaccgggagtaaaacatatggcgatcttttttcccggttgatgttatcaaccgggactataaatagatctttagtctcggtt

SEQ ID NO: 11052 - DNA, 89 bp, Oryza sativa
acttgagagcagcacaacattagacaatgaagaaacaaccttactttcttatgaaagccattacttgagagcagcacagcattagacaa

SEQ ID NO: 11053 - DNA, 112 bp, Oryza sativa
aaacatttctccatttcgcttcttccccaatatttgttttagaaacatttctccgccacaccatagatccccaatatttgattcataaacatttctccatttcgcttcatcc

SEQ ID NO: 11054 - DNA, 82 bp, Oryza sativa
gagggaaaaaggtaagatacgcctaattgggctattaaaacacgcactcaccccagagagggaaaaaaggtaagatacgcct

SEQ ID NO: 11055 - DNA, 98 bp, Oryza sativa
catcaatctcagccaggtgatatacgattacgccaggtaatatatgcttcaggcacacctattgccaacatcaatctcagccaggtgatatacgatta

SEQ ID NO: 11056 - DNA, 131 bp, Oryza sativa
ccttttctcttcctcctagcattcttttagaattaactaggtgaaaaaaaccttttctcttcctcctagcattctaaagttttcttttgtatttttgggtttttatccttttctcttcctcctagcattct

SEQ ID NO: 11057 - DNA, 112 bp, Oryza sativa
ttcggcagtccaaccggcgatataccggcggtcagaccggcggcatacgggcgatcagaccggcggcggcgacaggcgcggcaggtgacatcggcggtcagaccggcggcat

SEQ ID NO: 11058 - DNA, 89 bp, homo sapiens
cattgattgggatggattggaaatagctcaaattccacaagagcaagttcatcaccaagtcattgattgggatggattggagatagctc

SEQ ID NO: 11059 - DNA, 98 bp, Oryza sativa
ggccgaggatgcggcggcgacggaaggatggcgacgtccgtcggaaggtccgacgagcctggcggtggtggctgcggccgaggatgcggcggcgatgg

SEQ ID NO: 11060 - DNA, 92 bp, Oryza sativa
tgtgccaccggttacaaacatgaaaagcttctcgtagaccttgttaaatcccaagagaaatattaaaactgtgccaccggttacaaacatga

SEQ ID NO: 11061 - DNA, 75 bp, Oryza sativa
agctaatgtgtactctcccttcgtcagaaaaaaatcaaattaggagtatatagctaatgtgtactctcccttctt

SEQ ID NO: 11062 - DNA, 72 bp, Oryza sativa
tgagaagaaagtgtgtgcacgtaatgtgtgtaattttctaattttgtgagaaaaaagtgtgtgcatgtaatg

SEQ ID NO: 11063 - DNA, 110 bp, Oryza sativa
gcggagagcccgcgggagtcgaggtcgtccgaggaagtagtggcgacggcggccggagcggcggcgggtgggcaaagcggcggcggagagcccccgggagtcgaggtcgt

SEQ ID NO: 11064 - DNA, 88 bp, Oryza sativa
agcctatatgagaagttggccctccggatgggctgatacccatatttcggcccactagagtgcagagcctatatgagaagtgggccct

SEQ ID NO: 11065 - DNA, 86 bp, Oryza sativa
tcttgctagaagcaaaagtacaatatatacttcaccatgatatatttattcagcaactttggtctcgctagaagcaaaagtacaat

SEQ ID NO: 11066 - DNA, 98 bp, homo sapiens
gaaattcctacataaatcctttgatccaaaggggccctaaataggaaaatttcctataggatttgagtcctacgaaattcctacataatcctttgatt

SEQ ID NO: 11067 - DNA, 88 bp, Oryza sativa
agcaaagttttgagcgtgaatgttaccgtttattgatgcattgggcaatgagcctcttgcttagcaaagttttgagcgtgaatgttac

SEQ ID NO: 11068 - DNA, 105 bp, Oryza sativa
tggctttgctcaagggacctgtagcatgcattctcatctagaagtacgaaagaaatgtgagacagaccacaaacgttgtggcttttctcaagggacctgtagcat

SEQ ID NO: 11069 - DNA, 94 bp, Oryza sativa
cgcatgaaattatcccccaacaatacaggtccttatcaaatcgtgttgtttctgtactagtgttgtccttacgcatgaaattatcccccaacaa

SEQ ID NO: 11070 - DNA, 144 bp, Oryza sativa
ccgagactaaaaaagaattggggtctaactcggtccgataactttttgagccgggactaaaaatgatctttagtcctggttggtgttaccaatcggggctagatcaaaaaaattttaaccgggactaaaaataatctttagtcc

SEQ ID NO: 11071 - DNA, 92 bp, Oryza sativa
attgcgagtttcactgtccgtattgatctgaagacggatttcgtttatgcccagcgagttgattgcgagtttcactgtccgtattgatctga

SEQ ID NO: 11072 - DNA, 77 bp, Oryza sativa
ttaacagaaaatagtcagagaaaactctcactattcattcttttttgctaaaagttaacagaaaatagtaagagaaa

SEQ ID NO: 11073 - DNA, 92 bp, Oryza sativa
caatctaagaggggatgtgaggggtttcgttggaaaaatgaataccactagttgactaggcaatctaagaggagatgtgaggggtttcgttg

SEQ ID NO: 11074 - DNA, 79 bp, Oryza sativa
actacctgaatcatgtctgcctagcaaacatccatactgcactacataaaagtgcactacctgaatcatgcctgcctag

SEQ ID NO: 11075 - DNA, 104 bp, Oryza sativa
aaaaatcaaaacgaatccgactccgtcgacgtggtgaaaacagggcgaaaaaattccaaagtaaagggagaaaaaaaatcaaaacgaatccgactccgtcgacg

SEQ ID NO: 11076 - DNA, 104 bp, Oryza sativa; identical to SEQ ID NO: 11075

SEQ ID NO: 11077 - DNA, 129 bp, Oryza sativa
ttgtccttaagattaagatgacgcctgtaaagaaattgtttgggcttcttgtccttaagattgtccttaagattaagatgatgagatgtgattggtgcgcaatgaattgtccttaagattaagatgatg

SEQ ID NO: 11078 - DNA, 97 bp, Oryza sativa
tgattcgtgttccagcgatcctagatttttggggctaaaatcttgtagatttctaaccttgagatttgcttcatgatttgtgttccagcgatcctag

SEQ ID NO: 11079 - DNA, 84 bp, Oryza sativa
ctagcttttggggtgggaaagaccatttacgatcctacataaaggaactgaactaaatttctagcttttggggtgggaaaggcc

SEQ ID NO: 11080 - DNA, 108 bp, Oryza sativa; identical to SEQ ID NO: 10840

SEQ ID NO: 11081 - DNA, 150 bp, Oryza sativa
ttttgaaaatacaagggtttcaattggatatcatctcaaaacaaaaataccgatagttttggtatgtcatctgtatttaagttggtttttaaattcgttcgtttttgaaaatacaagggtttcaattggatatcatctcaaaacaaaaat

SEQ ID NO: 11082 - DNA, 88 bp, Oryza sativa
tgttcctcttgctgatctacatttgcttctatttttatctatagggaaatcagcgctccatgttcctcttgctgatctatatttgctt

SEQ ID NO: 11083 - DNA, 94 bp, Oryza sativa
agtggccgccgacaaccttgagcgggggtggcagagggcgctggcgacttggtgaccggcttagagctcggagtggccgccgacaaccttgagc

SEQ ID NO: 11084 - DNA, 112 bp, Oryza sativa
caggctagattttgcatgctcatatttgattaaaaccgtaggactaatcaggtagctatagtttattaggtagaacaggctagatttttgcatgctcatatttgattaaaac

SEQ ID NO: 11085 - DNA, 84 bp, Oryza sativa
tggccgccggcgcgtgtaggcggagagccaccagagggccgccgccgcgcgcgcctccctggccgccggcgcgtgtaggcggag

SEQ ID NO: 11086 - DNA, 144 bp, Oryza sativa
tccatacaactgaggatatatgtatttgaataatcaagcattgttttcttatttgatttaatatatatacaattgaagagatgtgcaaactttatataatttccttcaaatttcacattattatatacaattgaagagaagtgc

SEQ ID NO: 11087 - DNA, 127 bp, Oryza sativa
tacctgaaaacaatatttgctcgaagggagtgtgtgagttgctcccaagtcccaataatcaagcaacttattaagttaaatgagataagtacctgaaaacaatatttgctcaaagggagtgtgtgag

SEQ ID NO: 11088 - DNA, 97 bp, Oryza sativa
taagggcgatataacaatatcggccattgtacatcggcaaaccacaaccgattacaccatgaaaaacaaataagggcgatataaccatatcggccat

SEQ ID NO: 11089 - DNA, 97 bp, Oryza sativa
ccttgcctccgccagatccggcggtgtggaggcggctgcagcccggcgggggtgggaggggcggcgggccggacctcgcctccgccagatccggcgg

SEQ ID NO: 11090 - DNA, 91 bp, Oryza sativa
ccgccagcggagggccgcctcgtcgccgagccaccgccgctcctccgcagccctccgcatccgccgccagcggtggccctccgcgtcgcgc

SEQ ID NO: 11091 - DNA, 100 bp, Oryza sativa
aaggtttggctaatccaacctaattgtaactagtggataagaaagcctgactatagctgaacacagaagagaagaaggttggctaatccaacctaattgt

SEQ ID NO: 11092 - DNA, 75 bp, Oryza sativa
actagttctatattcatgcatgcatgcatttcgtccagtcagattagggtgcactagttctatattcatgcatgc

SEQ ID NO: 11093 - DNA, 88 bp, Oryza sativa
ccacggttgcggtcgtcatcgtcaccgccgcagtcagatccgccaccactgcccacctgccgtcgccacggtcgcggtcgtcatcgtc

SEQ ID NO: 11094 - DNA, 118 bp, Oryza sativa
ggaaagtagacttattctaggatgggcccatagacatagtgccagcaataataggtgaaaaaatgcgggagatttgacacgagggagggaaagtagacttattctaggaggggcccat

SEQ ID NO: 11095 - DNA, 94 bp, Oryza sativa
gacccaaatcaccccatccgtcccccatgcctaaaccctagtttgttccaatcaaacaagagctgcttctgacccaaatcaccccatccgtccc

SEQ ID NO: 11096 - DNA, 92 bp, Oryza sativa
gtttatcatagaataagatcaaaatcctctcttcatatttattacctgcaaagcacctctttgaaatgtttatcatagaataagatcaatat

SEQ ID NO: 11097 - DNA, 75 bp, Oryza sativa
tttccttttatctttaggaaagtgtgtttagtgtcatataaggactttatcttttccttttatctttaggaatgt

SEQ ID NO: 11098 - DNA, 78 bp, Oryza sativa
tggtaatctgacctcaggtagcaaagtggcacgtggatcagagttgcagccaccgtggtaatctgacctcagggagca

SEQ ID NO: 11099 - DNA, 95 bp, Oryza sativa
catggatgtcaggatagcccctatgatcctcaatggcacgaataccatggtagcccctacgatcctcaactacacggatgtcaggatagccccta

SEQ ID NO: 11100 - DNA, 86 bp, Oryza sativa
gaagtaaaaaagcattaaagatgtgaaaaagatgaatggagctagtttagaagagagagaagtaaaaaaacattaaagatgtgaaa

SEQ ID NO: 11101 - DNA, 126 bp, Oryza sativa
aatattttacatgacatgaacatgttagctatacttggcaaccaatctcatgtcactcataaccgagtttctagtgaaaatgtttaatttaatattttacatgacatggacatgttagctatactt

SEQ ID NO: 11102 - DNA, 224 bp, Oryza sativa
atgcaacatgagaagctctatcatggtttcagcttttggttaaatgtcaggttgtatatatggtaaagtaagatcagtattacgcaagtaaatgcaacaaatcatgtaatataggaagttttatggtggtttcagcttttggaatatgtaatataaagttttatgatggtttgaacttttggactatgtaatataggaagttttatgatggtttcagcttttgg

SEQ ID NO: 11103 - DNA, 161 bp, Oryza sativa
aatattaggaacgcgctgcgctcctaatagtagtaatattaggaacgcgctgcgctcctaatattaggaacgcgctgcgcttcagttattcctctgatcttgtatctactgacaccggcaagatgtgtaacaggaacaatctgaaggacaccctgctctct

SEQ ID NO: 11104 - DNA, 93 bp, Oryza sativa
tctctctctctcctttttgcaacggaccagaatccaatcccgcgagatttcctctgcgtctctctctctctctctctcctttttgcaacggac

SEQ ID NO: 11105 - DNA, 135 bp, homo sapiens
ggggtggggagtatttttccaatgagtttacatccttttgcaaagagttttgaattattcatgaggcagccgaaagaaacggttgaggtctgattggggtggggagtatttttccaatgagtttacatccttttg

SEQ ID NO: 11106 - DNA, 125 bp, Oryza sativa
aaatataaagcattccctcttgaagggtgtgcgttttctgatttgatgtgaggtgacaccgtgacagaaattaacaggaccaaaagtacaaatataaagcattccctgttgaagggtgtgcgttt

SEQ ID NO: 11107 - DNA, 95 bp, Oryza sativa
ggggagagagagagagttgagaggataaggatgaggcagtgagaagaggataaggatgaagtggtggggaaggagagagagagagttgagaggat

SEQ ID NO: 11108 - DNA, 94 bp, Oryza sativa
gaatttaggggaacaacatgctgaaaagaataatatgcagcatgagaataacgtacttcttcagaatttaggggaacaacatgctgaaaagaat

SEQ ID NO: 11109 - DNA, 110 bp, Oryza sativa
attgctatattctgggacggaggaagtagtagagcatgtccagatacggtactaggtgatgtcccatctagttctatattgctatattctgggacggaggaagtagtaga

SEQ ID NO: 11110 - DNA, 82 bp, Oryza sativa
catgtgtcaaaggggagacgctagaagaaaccggagggaagtgcctcttttattcatgtgtcaaaggggagacgctagaaga

SEQ ID NO: 11111 - DNA, 103 bp, Oryza sativa
cggctcctggcccctccctcccagatctggccgggggaaggggggcggggtgtggggcggggggagagcggtggctggcggctcctgcccctccctcccagat

SEQ ID NO: 11112 - DNA, 80 bp, Oryza sativa
tcttcgcaggcggggcggccgtccgcctgtaagccaacgactgtgaagatcgcgatcttcgcaggcggggcggccgtccg

SEQ ID NO: 11113 - DNA, 93 bp, Oryza sativa
gcagcaccgtgtgaagcacggcaccatcgatatcttatattctggttgcacatgccgaacgcagcaccgtgtgaagcacggcacgatcgatat

SEQ ID NO: 11114 - DNA, 102 bp, Oryza sativa
cgcgaaatggtgctcgacggcgcgcgcaatggtgctcgacgcggaggtgggaacgtccgaacgtgctcaccgccggccgcgaaatggtgctcgacagcgcgc

SEQ ID NO: 11115 - DNA, 109 bp, Oryza sativa
ccccaaaccggatctgtagctcaccgatgactccagtgatcggatccaccagtggggaggccgagaccatcgattccaatgaccccaaaccggatctgtagctcaccga

SEQ ID NO: 11116 - DNA, 88 bp, Oryza sativa
gttaaaaacaataaataaataaataaaacaataaataaataaatttgacgagtacctttcatattatttgttacaaacaataaataaa

SEQ ID NO: 11117 - DNA, 142 bp, Oryza sativa
ggtagattccgaacaaatttcataaaccaaaatttgaatacaaattcgctcgcaaaactggtcatgatggttttcgcgaaatctggtgaaaagccggtagattccgaacaaattccataaaccaaaatttgaatacaaattc

SEQ ID NO: 11118 - DNA, 92 bp, Oryza sativa
gttatatcgcccttagttgtttttatagtgtaatcagttgtggttcgccgatgtacaatggccgatatggttatattgcccttagttgtttt

SEQ ID NO: 11119 - DNA, 106 bp, Oryza sativa
cgagggcagtagatgcggcggccatcgaccgacagcggcaccgtgggtcgggcgccgggcgggagttggagtggcggcgagggcggtagatgcggcggccatcgac

SEQ ID NO: 11120 - DNA, 74 bp, Oryza sativa
ttcttgctgtgtgtccgccattgcagcaagctcgggtagcttctggaagcttctgctgtgtgtccgccattgca

SEQ ID NO: 11121 - DNA, 82 bp, Oryza sativa
ataaaaagaaagtgactatatattatttcatcatgtaccacttcactggcatgcataaataaaatagaaagtgactatatat

SEQ ID NO: 11122 - DNA, 107 bp, Oryza sativa
tgacagagtgagatggggattcgtttatggggtgtttgacagtgattctgaaactagattttgagaaggcttgacagagtgagatggggattcgttatggggtgttg

SEQ ID NO: 11123 - DNA, 101 bp, Oryza sativa
cctccgctccggccaccttctcctcgtcggtggaaagacgccgtcacggggagagcgcagggacggccgtcgtccgcctccgctccggccacctcctcctc

SEQ ID NO: 11124 - DNA, 75 bp, Oryza sativa
tttccttttatctttaggaaagtatgtttagtgtccgataaggactttatcttttccttttatctttaggatagt

SEQ ID NO: 11125 - DNA, 196 bp, Oryza sativa
tgtgtttacatcgacttgagatggccgatatagttatatcgcccttagtcgtttttcttatcataatcggctgtgactttgccgatgtatgatggctgatatggttatatcgcccttagcagttttggtttcatttagcataatcggatgtgactttgccgatgtatgatggccgatatggttatatcgcccttag

SEQ ID NO: 11126 - DNA, 106 bp, Oryza sativa
gtatcccctcacctgtgacggtccgaaaggaaaacccgtcagaggtataccagtgacgagtttttcatccaacccgtcactggtatcccctcacctgtgacgggcc

SEQ ID NO: 11127 - DNA, 83 bp, Oryza sativa
taattactagtgggtgatgatgtgatatacttacatgccatttaaaatactctatataataattactagtgggtgttgatgtg

SEQ ID NO: 11128 - DNA, 77 bp, Oryza sativa
acgagcatataatatacttgaagataaattttcctcggttccatgaattcatggacgagcacataatatacttgaag

SEQ ID NO: 11129 - DNA, 181 bp, Oryza sativa
ttaactttagtcccggttcttaaccctaaccgggtttaaaaaagaatttggaaatagcgggaaaatatctttactcccggttcttctcaccaaccgggagttcttatttttaatcccggttgttgttacgaaccaggagtaaagatatctttactcccggttcttctcaccaaccgggagt

SEQ ID NO: 11130 - DNA, 102 bp, Oryza sativa
cgcagtcgcctccgctcggccgttgttgcgacgccgccgtccgccgcccgcccccgtgcgccgcgcccgcagctgccgtcgcagtcgcctccgctcggtcgt

SEQ ID NO: 11131 - DNA, 111 bp, Oryza sativa
aatcaaacaacgagacaaccaaaaacactcataggattcgagtccgattccttaaaaaaaatcccccatcttgatccccaaatgaatcaaacaatgagacaaccaaaaaca

SEQ ID NO: 11132 - DNA, 104 bp, Oryza sativa
cttcacactccgcatcacctccttgccccctcccccctccggccaaatcttggagggaggggagccgccaccgccaccgcttcgaccctccgcaccaacgccgc

SEQ ID NO: 11133 - DNA, 126 bp, Oryza sativa
ggatgggagagagagaaaagggtcggcagagagaaggggcagagagggatcggagggagggaagagagaaggggcagagagggatcggaggcaatacgggaggggagggagggaagagagaaggga

SEQ ID NO: 11134 - DNA, 77 bp, Oryza sativa
gaaaggcccaatctccctaaaagactagtccaacaggggaagggtggctgggtgaaaggcccaatctccctaaaaga

SEQ ID NO: 11135 - DNA, 103 bp, Oryza sativa
agatctaaatgatctttactcccaattgaagttaccaaccgagactaaagatagatctttagttcaccaaccgggactaaagatctaaatgatctttacttcc

SEQ ID NO: 11136 - DNA, 105 bp, Oryza sativa
agatacaaaaagatgtatatagtcaaatgcgaagtaacatatacatatatatatatatatatacatatatatatatatatacatatatatatatatacatatata

SEQ ID NO: 11137 - DNA, 68 bp, Oryza sativa; identical to SEQ ID NO: 10800

SEQ ID NO: 11138 - DNA, 224 bp, Oryza sativa; identical to SEQ ID NO: 11102

SEQ ID NO: 11139 - DNA, 137 bp, Oryza sativa; identical to SEQ ID NO: 10954

SEQ ID NO: 11140 - DNA, 101 bp, Oryza sativa
aactgtctcttgtgttagagtgcacaaccgaagctgatttgttaggtaagacacaattgagaagtactagttttcttaactgtctcttgtgtttgagtgca

SEQ ID NO: 11141 - DNA, 266 bp, Oryza sativa
atttttggaacttccaaaaattccagatctaggataatcgaagtcaacgcccattttcggaacttccaaaaattcttttcggatatttctgaaaatttccagaacccataataccttctgtggattttcggaacttccgaaaaacattttcagaaacttccgaaaatttgcagaagcatatttggctcgcggatattttcggaacttccaaaattttccaggaggttaaaatcggttctgtgtattttcggaacttccaaaaattt

SEQ ID NO: 11142 - DNA, 90 bp, Oryza sativa
gaagcacctaaatatgatcataagtaccaattgcgaggtggataaagtttgacctcaataatttatcgaagcacctaagtatgatcataa

SEQ ID NO: 11143 - DNA, 86 bp, Oryza sativa
ccgaatccttggaaacagtcttgacgacaaggatgtattcgatgtgagcaaaataatgggtgccgaatccctggaaacagtcttga

SEQ ID NO: 11144 - DNA, 113 bp, Oryza sativa
aaggatcagcatggaatgccatatatcaccaaaacaagaactaaatatagacggagaggggaaaaaagaatggaaggatcagcatggaatgccagatatcaccaaaacaagaa

SEQ ID NO: 11145 - DNA, 92 bp, Oryza sativa
aattaactcacactttaaatgtttcatgtattgaacaatatatcgcttcatatctaacataaataattaattcacactttaaatgtttcatg

SEQ ID NO: 11146 - DNA, 73 bp, Oryza sativa
tttaaagaagattagacatcagttgaataaaagattttgaagattgtcttttaaagaagattagacatcagtt

SEQ ID NO: 11147 - DNA, 308 bp, Oryza sativa
acggtcccggacttaatattttttttttgtccgaaataaattgttctactttacgatcgatcgaaaaaccttttttaaaatcaacgcgatctacacggtccagaccgttccggacttaattttttttccaaaacaaaccgttttgctttattctatgcacaatcaacccaaaaaccatgatttttaaaaatcgacccggtctaaacggtcccgaacttaatatttttttatccaaaatatatggttctgctttattctatgcgtggtcgaccgacctggtccagacggtcccgacttaatattttttt

SEQ ID NO: 11148 - DNA, 199 bp, Oryza sativa
ggaaaagggagaggaggaggtggaggagaggggaggggatgaggaaggggaggaggtggaggggaaggggaggatgggcaggaaggggagaggaggaggtggaggagaggggatcggatgaggaaggggaggaggtggaggggatggatcgggatgaggatgtaggaagcggaggaggaagggaaagaaggggagagat

SEQ ID NO: 11149 - DNA, 198 bp, Oryza sativa
aaccgggactaaagtggtgatatttagtcccggtttgtgataccaaccgggactaaagatccccgcccctctgacaagggactgataggggatgaaccgggactaaagatcatcttttttcccggttggtgttaccaaccgggactaaagatcgtagaatggctatggggttttaaaccgggactaaaaatcatcttt

SEQ ID NO: 11150 - DNA, 86 bp, Oryza sativa
atcttcgcaggcggggcggctgtccgcctgtaagctaacgactgtgaagatcgccgatcttcgcaggcggggcggccgtccgcctg

SEQ ID NO: 11151 - DNA, 106 bp, Oryza sativa
caaactggtaattgcacataaaaatatttacacttttcaaatattattaactttaaatttttttaactaaattttcacaattcaaatggtaattgcacataaaaat

SEQ ID NO: 11152 - DNA, 89 bp, Oryza sativa
ccttcctattttctagctaataatttaatttttaaaaaatattataaaggaaaattttaatccttcctatattctagctaataatttaa

SEQ ID NO: 11153 - DNA, 114 bp, Oryza sativa
gatgagggtcattttggtcatttttacttctcactaaatttgacttcctatcaccatttatatatttttcatagatgagggtcattttggtcatttttacttctcactaaattt

SEQ ID NO: 11154 - DNA, 140 bp, Oryza sativa
ctcctccgccatcaccgcctcgtcagtctcctccggctccttcccctgcaccaccatctcctccgcgtgcaccagctgccaagtctgcaccgtcgggcccgcgggcaactactcctccgcgtgcacctgctgccaagtct

SEQ ID NO: 11155 - DNA, 102 bp, Oryza sativa
gaggaggccgctgtgttcctccactcactcgctgctgagagacggcgaggaggagttcctcctctccctgactgccgaggaggccgctatgttcctccactc

SEQ ID NO: 11156 - DNA, 112 bp, Oryza sativa
aaattaaaaataaattggtgaattcaagacccttcttctctcttttaaattttttttctctccctccttcttctctcttttagaaaaattaaaaataaattggtgaattcaa

SEQ ID NO: 11157 - DNA, 164 bp, Oryza sativa
cccgtcacaggtatcccctcacctgtgatgggccggaaggaaaagccgtcacaggtgagaaagtgacgggttttcctcccaacccgtcacaggtatcccctcacctgtgactggccgtggcagattttttttacggcctgtcacaggtaggtcaatacctttga

SEQ ID NO: 11158 - DNA, 163 bp, Oryza sativa
atggtcccggacttaatactttttttttccaaaataaaccgatttgcttcccgatccaaacagtcccggacttaatatttctgcttcattctatccgtggtcgaccgaaaaaccatgatcttttttaaaatcgacctggtgatcccgaacttaattttttttt

SEQ ID NO: 11159 - DNA, 116 bp, Oryza sativa
gtccaaaagtgcaagtccggaacttcctgtcttccaggtccggaagttccggtcttgtgaaaaagtttttcctaagtgtagtccagaagttcctgtcttccaggtccggaacttcc

SEQ ID NO: 11160 - DNA, 109 bp, Oryza sativa
ggtcatacgttaagctatcatgatattaatgtgtaccatattacatcaagtttgctttgcgtgggtctctttagccaggccggtcatgcgttaagctatcatgatatta

SEQ ID NO: 11161 - DNA, 108 bp, Oryza sativa
ggtggcgacacggatggtccggtggcggcggcacggatggtccggtggtcagcggaggtcccggcgcgcgcggaggtcggcggcggcgacacggatggtccggtggtc

SEQ ID NO: 11162 - DNA, 101 bp, Oryza sativa
aaacttggtaagatttattttggctacaatgttcacaatattgctattttgctaaaattttagcattaccaaaacttggtaaggtttattttggctacaat

SEQ ID NO: 11163 - DNA, 104 bp, homo sapiens
tagcccttagatgattaatctatgatctaaattatctttttttttcttttctcattgagccatatcacctcaattgtctttagcccttagatgattaatctatg

SEQ ID NO: 11164 - DNA, 172 bp, Oryza sativa
tttattcccggttagtaacaccaaccggggctaaaaataggtttttagtcccggttggtgttaccaaccgggactaaagatcctagggccctgacacggccttacatggaatcaaccgggactaaaaatgaactttagtcccggttggagttaccaaccgggactaaagatc

SEQ ID NO: 11165 - DNA, 89 bp, Oryza sativa
tcgtcaagactgtttccagggattcggcacccattattttgctcacatcgaatacgtccttgtcgtcaagactgtttccaaggattcgg

SEQ ID NO: 11166 - DNA, 107 bp, Oryza sativa
ctaaagatgatctttagtcccggttcaaaagggtaacggacatatttgatctttagtcccggtttgtgttaccaaccgggactaaagatcatctttagtcccggttc

SEQ ID NO: 11167 - DNA, 102 bp, Oryza sativa
cgatattgttatatcgcccttagttgtttttcatattgtaatcggttgtggtttgccgatgtacagatggtcgatatggttatatcgcccttagttgttttt

SEQ ID NO: 11168 - DNA, 111 bp, Oryza sativa
ggatagattctgaaaatatataagatggcacctggatgtcattgtgatttagcttttaattaatctctcatttaggggataagtggatagattctggaaatatataagatg

SEQ ID NO: 11169 - DNA, 93 bp, Oryza sativa
gtttgtttgtttgtttgtttgttcttaagattaattaaaataaatgaaaatcaaatacatcaatattatagtttgtttgttcttaagattaat

SEQ ID NO: 11170 - DNA, 80 bp, Oryza sativa
aagaaagtaattctaacgaaaaaaagtaattcaatggtctttatgtggtttcttcacaagaaagtaattctaacgaaaga

SEQ ID NO: 11171 - DNA, 100 bp, Oryza sativa
atggccgatattgttatatcgcccttagtcggtttttcaaattgtaatcggttatggtttgccgatatacaatggccgatattgttatatcacccttagt

SEQ ID NO: 11172 - DNA, 98 bp, Oryza sativa
cgacagttgtgtgtttccaaatacgccagtgtacatccgtcacatcgtcacagtgagaggtcgatctgtttcgtcgacagttgtgcgtttccaaatac

SEQ ID NO: 11173 - DNA, 92 bp, Oryza sativa
agatgaaatccctgaaggtgctctatggagcaaagtagaaggagcagatgaaggcatgaaggagcagatgaaatccctgaaggtgctttatg

SEQ ID NO: 11174 - DNA, 97 bp, Oryza sativa
gtggttgattgaacatcataccgataagcatgtgggttgcaccgaggaatcttaacatgttgaaaataaagctgtggttggttgaacatcataccga

SEQ ID NO: 11175 - DNA, 208 bp, Oryza sativa
tggttctcgaactagtgcgtagcaatctcccccaccgcaagcttccattggtgttcgagagatgattctactcgctcgctggttctcgaaccagtgcgtagcaatctcccccaccgcaagcttccattgatgttcgagagatgattctactcactcgctggtcctcgaaccagtacgcagcaatctctcgcaccgcaacctcaaatgg

SEQ ID NO: 11176 - DNA, 89 bp, Oryza sativa
tccaagaaggcatgtgaaaggaatcagctccatccggaaggtgcaagctcacaggcggcacctgcatccaagaaggcatgtgcaaggaa

SEQ ID NO: 11177 - DNA, 157 bp, Oryza sativa
gttcgttttatcgtatgaggcctttagattgcaatcatttgccaacaaaatacgagtcttaatgccaacaaaatacgagaatactaatgcgcgattgtttggcatggttcgttttatcgtatgaggcctttagattgcaatcatttgccaacaaaat

SEQ ID NO: 11178 - DNA, 108 bp, Oryza sativa; identical to SEQ ID NO: 10840

SEQ ID NO: 11179 - DNA, 74 bp, Oryza sativa
gcagggggtcaggctcaacccgcagacgcaccgccagttctgccagatccagcaggggatcaggctcaacccgc

SEQ ID NO: 11180 - DNA, 162 bp, Oryza sativa
gttcacagggctgttggcctaccaagcaagcatttgcccgcagctcctgccacctgccaagcgggctccgcgctgctcagtgtgcccccctttcgtcgagtgccccgcccggttcacagggctgttggcctaccaagcaagcacttgcccgcagctcctgcc

SEQ ID NO: 11181 - DNA, 87 bp, Oryza sativa
gtcgtcaagactgtttccagggatttgacacccattattttgctcacatcgaatacgtcctcgtcgtcaagactgtttccaaggatt

SEQ ID NO: 11182 - DNA, 103 bp, Oryza sativa
tgtgcctttttggcttctcgcgacattatcttcgtacggtgtttagctatagcctatgaattttgggtgtgtgcctttttggcttctcgcgacattatcttcg

SEQ ID NO: 11183 - DNA, 71 bp, Oryza sativa
acaaaacagaaaccactactattgtgccaaaaaaattttttttgggctacaaaacagaaaccactactatt

SEQ ID NO: 11184 - DNA, 98 bp, Oryza sativa
ggctctgataccatttgtaacaaccatgcgccatatgcccgtacactaacccgtacgcgtaaccgcgagggttggctctgataccatttgtaacaacc

SEQ ID NO: 11185 - DNA, 158 bp, Oryza sativa
gctgctgctgcctagttgatggtggtggaggtgataatggcacttgaaggtcagccaaacgtagaggctggtaatggagtcttgagagcgccggtcgcggtggcggctgctgctgcctagttgatggtggtggaggcgataatggcacttgaaggtca

SEQ ID NO: 11186 - DNA, 105 bp, Oryza sativa
agtgactaataccatttatatatgttgaatttatcaggtacatatattttacctgaatatatgtacctgagaagtgactaataccatttatatatgttgaattta

SEQ ID NO: 11187 - DNA, 97 bp, Oryza sativa
agggaaaactgaaacatatacacacaaccaaaatcccatccggaattccatcatacaaattgaataggagagggaaaactgaaacatatacacacaa

SEQ ID NO: 11188 - DNA, 109 bp, Oryza sativa
atttgccggcctagtcttcaaagatactcatagaggtagggtttgcctgtggtgacttcgtcaatctctaaaggcggatttgccggcctagtcttcaaagatactcata

SEQ ID NO: 11189 - DNA, 260 bp, Oryza sativa
actcaaattagtataaacaactttgtacaaaaataaattgtatattaacaatatgtcgtatgaacaaatttaaattgtctgagattaccatatattaacacgtagggaaaatagatatgttattaattagtacttactattatgctaaattaattagtacaaacaaatttaaattgcgaaattaattactacttacaattatgctagaatagatatgttattaattagtacttatgctattaattagtacttactattat

SEQ ID NO: 11190 - DNA, 182 bp, Oryza sativa
gggcgggaggggaggcgcggcggcgccggcccgaccgccagatccgacaggggcgggaggggaggcgcggcggcggctcggccgcccgatccggcaggggcgaggggaagcggggtggcggacgacggatctggagccgtggcgcggtggcggccgacggcgggaggggaggcggccgaggc

SEQ ID NO: 11191 - DNA, 109 bp, Oryza sativa; identical to SEQ ID NO: 11188

SEQ ID NO: 11192 - DNA, 147 bp, Oryza sativa
aaattaattagtacaaacaaatttaaattgcgaaatgttattaattagtacttactattatgctaaattaattagtacaaacaaatttaaattgtgaaattaattactacttactattatgcaaaattaattagtacaaacaaagtt

SEQ ID NO: 11193 - DNA, 80 bp, Oryza sativa
catagatgaaatgcttgctatctgttgcctgtagcctccgtgtatatattggcttagcctagatgaaatgcttgctatct

SEQ ID NO: 11194 - DNA, 91 bp, Oryza sativa
caacgcaagtgcattatttctagtacatctcaacttgctcatattttttttcctgttgcaacgcaagtgcattatttctagtacatctcaa

SEQ ID NO: 11195 - DNA, 120 bp, Oryza sativa
ctaaatcctgaaatcccaaatcctcaaatcgatcatctccaagtacatcctaagtcatcacagatcacagatcaaaaggatcatctccaaatcctcaaatcgatcatctccaaatacatc

SEQ ID NO: 11196 - DNA, 95 bp, Oryza sativa
aaaaacaactaagggagatataacaatatcggccattgtacatcggcaaaccacaaccgattacaacatgaaaaaacaactaagggcgatataac

SEQ ID NO: 11197 - DNA, 115 bp, Oryza sativa
attcttcccgagtgcacaagaatgaggataaagtgtgcaaaaaagacttgtgttggtctgtgagggcagtctatggcctataaaagcattcttcccgagtgcacaagagtgagga

SEQ ID NO: 11198 - DNA, 72 bp, Oryza sativa
tttccttttatctttaggaaagtgtgtttagtgtcctataaagttatgttttccttttatctttaggaaagt

SEQ ID NO: 11199 - DNA, 101 bp, Oryza sativa
gatttgaaaattttgaaaactttcaatttgagatttgaaaactttcaactcgagattcaaaaacttccaaatgcagatttgaaaattttgaaaactttcaa

SEQ ID NO: 11200 - DNA, 89 bp, Oryza sativa
taaattattagctagaatataggaaggattaaaattttcctttataatatttttaaaaaaattaaattattagctagaaaataggaagg

SEQ ID NO: 11201 - DNA, 99 bp, Oryza sativa
taacaatccaaatatgccctaaaaattaataaaatatttgtacggtaacaaaatatttgtacggtaacaatccaaatatgccctaaaaaataataaaat

SEQ ID NO: 11202 - DNA, 150 bp, Oryza sativa
aactaactttgaactgcttatgaactaactattaatttatatgcttaacttgtctgcctaacaatgagtgattatcttaacaactattggtctaactcaactaactttgaactgcttatgaactaactattgatttatatgcttaacttg

SEQ ID NO: 11203 - DNA, 98 bp, Oryza sativa
tttctgagaggaataggagtcggaccttttttttattttttcgctatttttttttgatggacggactttttttttctgagaggaataggagttggacc

SEQ ID NO: 11204 - DNA, 116 bp, Oryza sativa
atctctggtgttcttcctcctccgcgcgcctgctatgatataaggaaaccgctaatccgatcagatctctctcgcttgcattccatctctggtgttcttcctcctccgcgcgcctg

SEQ ID NO: 11205 - DNA, 192 bp, Oryza sativa
gaacgagaacgagaacgatcgaacgaacgagagcgagaacgaacacgtcaacgtacgttgccgggagaacgtgaacgagaacgagaacgatcgaacgaacgagagcgagaacgagaacgatcgaacgaagacaagcgagaacgagggaacgaacgtgaatgagaacaagcgaacgaacgtgaatgagaacga

SEQ ID NO: 11206 - DNA, 108 bp, Oryza sativa; identical to SEQ ID NO: 10840

SEQ ID NO: 11207 - DNA, 74 bp, Oryza sativa
gcccctgactggaaaccagtcggccgaagctagaatcggggttaatcaggtgcccccgactggaaaccagtcgg

SEQ ID NO: 11208 - DNA, 120 bp, Oryza sativa
agagtcggctctgataccactttgtaacgtcccacctctcccaggctgggcccgcgtaactgcgacacacgcgcccgtgaaaccacgagagtcggctctggtaccactttgtaacgtccc

SEQ ID NO: 11209 - DNA, 75 bp, Oryza sativa
ccgactgatttccagtcgagggctcctgattagcaccaactcctgcttcggccgactgatttccagtcgggggct

SEQ ID NO: 11210 - DNA, 75 bp, Oryza sativa
gtggttcgagaagagcatgtctggagcatgatgaagagagtgcttggaggttgtggtttgagaagagcatgtctg

SEQ ID NO: 11211 - DNA, 159 bp, Oryza sativa
ccgactggtttccagtcgggggctctctggttgttgcagtttcagttgttgccgactggtttccagtcggcggctggtcactcggattggccttgtcatccgaagcatgggcgccagtcggctgactttcggcagtcggctggctttcagcagtcggct

SEQ ID NO: 11212 - DNA, 128 bp, Oryza sativa
gaaattaaccattttctaccgtactgttccaatcgtttgttcttcacaagtatttgggtagtcttatgtcggttggaacaatactagccacccggaaatcaaccattttctaccgtactgttccaatc

SEQ ID NO: 11213 - DNA, 127 bp, Oryza sativa
caaagtatggagtgaagctcactagctctcaacttctcaatcactcaatccaactctttccccttctcaaatccctctcacaaaaaggcaccacaaaggatggagtgaagctcactagctctcaact

SEQ ID NO: 11214 - DNA, 91 bp, Oryza sativa
tttgggaatttcaatcttgtttatcccaaactcctcttttctgagctaaatagttggggaaaagtttgggaatttcaatctagtttatccc

SEQ ID NO: 11215 - DNA, 94 bp, Oryza sativa
aaaatttcgttgctccaccgttccaatttttaccaaatgcaccttgcaattttatccaaatatttttaaaaaaatttcgttgctccaccgttcc

SEQ ID NO: 11216 - DNA, 97 bp, Oryza sativa
aatcaagccgacctgagcacatcaagaacttcaagaacaaatcaagaacatcatgaacatagagcacaaatcaagccgacccgagcacatcaagaac

SEQ ID NO: 11217 - DNA, 64 bp, Oryza sativa
gcaacggctccggtggcggtggcgatgctctagagaaggcggtggcacgggggagggggcggca

SEQ ID NO: 11218 - DNA, 200 bp, Oryza sativa
ggcgatgctcgggagggggcggcggcgcagggggggcggatccggcggctgtgtcggtggggtgagccggatccggcgcctgcctccccaccggcggtggtggcaatgctcgggagggggcggcgatgctcgggagggggcgcgaatacggcgcctgcctccctgccggcggcggcggcgatgctcgggagggggcggcg

SEQ ID NO: 11219 - DNA, 80 bp, Oryza sativa
tcgtccaataaactctcggtgcattcatgcccaaagtcgtgtaataaatacaacagtcgttcaataaactctcggtgcat

SEQ ID NO: 11220 - DNA, 140 bp, Oryza sativa
taaatttcacaaaacaacatataatttggtcaaattatcacaaaattatagatttaatatgatatatatcacaaaactacagatttaacagtaaatttatcacacaaaacttaaggctatatatcacaaaactacatatt

SEQ ID NO: 11221 - DNA, 122 bp, Oryza sativa
tgcttcctagctgttgacagtttttttcctacaatttttcgattttttgggcctcagatcatgctttgagatttgtaatagggatgatgtgcttcctagctgttgacagttttttttcctac

SEQ ID NO: 11222 - DNA, 99 bp, Oryza sativa
cgaatccttggaaacagtcttgacgacaaggacgtattcgatatgagcaaaaataatgggtgccgaatccttggaaacagtcttgacgacaaggacgta

SEQ ID NO: 11223 - DNA, 112 bp, Oryza sativa
gcgcttccacgttctttctcctgatagtcacgacgcaatccttttgcagccactaacccacgttctcacgattccctccgcaacagcgcgtccacgttctttctcctgatag

SEQ ID NO: 11224 - DNA, 104 bp, Oryza sativa
acctataatatattataggtgccggttctatttaaaaaaccgatattataggtgtcggttaattaaaaaaccggcacctataatatattataggtaccggttct

SEQ ID NO: 11225 - DNA, 137 bp, Oryza sativa; identical to SEQ ID NO: 10954

SEQ ID NO: 11226 - DNA, 82 bp, Oryza sativa
atgtcacagcaatgaccacgagaatgcgtattcttgttcttcgttgtattcaccctcatgtcacagcaatgaccacgagaat

SEQ ID NO: 11227 - DNA, 83 bp, Oryza sativa
gatgataaatctagaacaatagttatagaacttgatagtcaaagattaatatttttaattgatgataaatctagaacaataag

SEQ ID NO: 11228 - DNA, 254 bp, Oryza sativa
cttctcagacaagtccgaaaacaaccttctgtacgtttctgggaagtccgaaaaaacacagaagtgattttgactctactgaggattttcggaaaaaccgaaaatcaatttcggacaagtccgaaaatatacagaaccacttttgccctcgcagtcattttcggaaagtccgaaaatcacttttggacatatccgaaaattttcagaagcgaaaacttgttctgtgcattttcggaaagtccgaaaatgacttt

SEQ ID NO: 11229 - DNA, 316 bp, Oryza sativa
ggcagtcgatggcggcggcgtgggtggatcggcggcagtcgatggcggcggcgtcggcggatcatcaaggatggcggcagtcaaggacggtggcgtcgacggatcagcggtagtcgatggcgacggcgtgggccgattggtggcagtcgatggcggcggcgtcggcggatcgtcgaggacggcggcagtcgaggacgtcggcgtcggcggatcggcggcagtcgatggcggcggcgtcggattggcggcactcgagggcggcggcaatcgaggacggtggcgtcagcggtgcgacagtcgaggacggcggcgtggg

SEQ ID NO: 11230 - DNA, 187 bp, Oryza sativa
cggagatggtgccgccgtccgctgcggacatgccgccgtccgctgccaagagcgccgccgcagtcgcttgccaaggccgacgcgccgttgtccgctgccgaggccgccgctgtccactgccaacgcgccgccgtccactgccgagagcaccccgtcgtcgtccgctgccgacgcgccgccgtccact

SEQ ID NO: 11231 - DNA, 75 bp, Oryza sativa
acttttctaaagataaaaggaaaacataaagtccttatgggacactaaacacactttcctaaagataaaaggaaa

SEQ ID NO: 11232 - DNA, 93 bp, Oryza sativa
aaaatactctagataataattgctagtggatgataatgtggtacacttgcatgtgattgaaaatactctagataataattgctagtgggtgat

SEQ ID NO: 11233 - DNA, 87 bp, Oryza sativa
ctttaagagctgctatagataaaatttgccttttttagctacggagtacgtgtgtaacgacttgctttaagagctgctatagataca

SEQ ID NO: 11234 - DNA, 110 bp, Oryza sativa
ttctggtttcctccagaactccatacacctcatcacctcatcgtacaatcctccctttcctagacaaactgcttctggtttcctccagaactccaaacacctcatcacct

SEQ ID NO: 11235 - DNA, 75 bp, Oryza sativa
aaaggaagcgggcggaaaaaaaatttctcgaaaaaaaacggcgcgacgaggaaaaggaagcggacggaaaaaaaa

SEQ ID NO: 11236 - DNA, 75 bp, Oryza sativa
actttcctaaagataaaaggaaaacataaagtccttataggacactaaacacactttcctaaagataaaaggaaa

SEQ ID NO: 11237 - DNA, 99 bp, Oryza sativa
tctgacccctttccatcggtgggatcgagaaattatcagaattgctccctgatattggtgcaatacaaaagcttttctgacccctttccatcggtggga

SEQ ID NO: 11238 - DNA, 167 bp, Oryza sativa
accagagagaactgagggcaaagcaacctaccttgccaaattaccccaatcagtactcgccctccctccctccctcctccccccccctccttcctctctctctctctctctctaccagagagaactgagggcaaagccacctaccttgccaaattaccccaatcagt

SEQ ID NO: 11239 - DNA, 85 bp, Oryza sativa
tacaaaactctcgtccccttcctccttcatcacgtatggaaagatggaaaccgaatccaatctacaaaactcttgtccccttcct

SEQ ID NO: 11240 - DNA, 111 bp, Oryza sativa
aagctaattggatgataggatgctaagcattgtaccccaacatagtactccatttgtctcaaattataggatggtctcaagctaattggatgataggatgctaagcattgt

SEQ ID NO: 11241 - DNA, 82 bp, Oryza sativa
atgtcagcagccacgtcatcagtgacatgtcatcgcacaggtgtcaaaacaaaccatgtcagctgccacgtcatcagtgaca

SEQ ID NO: 11242 - DNA, 91 bp, Oryza sativa
tgaaatatctactgcacaatcccatatagtcaatcaacatcctaacatattaatggtcaaaattgtgaaagatctactgcacaatcccata

SEQ ID NO: 11243 - DNA, 91 bp, Oryza sativa; identical to SEQ ID NO: 11242

SEQ ID NO: 11244 - DNA, 141 bp, Oryza sativa
ttttttcagattgctgagatgtctcttctttcggcagtgcaaaaattcaatttattttttcttttttttttgtcatagatgtctcctgtatgtgttttttcagattgctgagatgttcttctttcggcagtgcaaaaattt

SEQ ID NO: 11245 - DNA, 104 bp, Oryza sativa
cctgtactagcgttacggtaatatttgaattatatttcgctgtttccactgtcgctttaggtagactagtaatatacctgtactaacgttacggtaatatttga

SEQ ID NO: 11246 - DNA, 100 bp, Oryza sativa
gatgaacttgaagaggagctgaacacacacgttcctcttttgcctacttttgcttcatgtccttagatgaacatgaagaggagctgaacacacacgttcc

SEQ ID NO: 11247 - DNA, 110 bp, Oryza sativa
gagctttgttgcttcatcttctctgccatggctggtaatcccctgcactccatccatgtactgttttgatgagctttgatgagctttgttgcttcatcttctctgccatg

SEQ ID NO: 11248 - DNA, 89 bp, Oryza sativa
gactttcctttttttcttttttttcgctctggatttttttctccgcgtcattgaatctggatcggactttctttttttcttttttttcg

SEQ ID NO: 11249 - DNA, 124 bp, Oryza sativa
ccccctcgccgcccatttgcaggcggcccccccacagtacaaaatcgccctagcggagagcggcaagggggccgcctgcaaaattccatgccccccctcgccgcccatttgcaggtggcccccc

SEQ ID NO: 11250 - DNA, 80 bp, Oryza sativa
ccgggaggtcattccacagaagaatgttacagtaagttttgtcatatacatggtccgggaggccattccacagaagaatg

SEQ ID NO: 11251 - DNA, 100 bp, Oryza sativa
cccggtgcaacgcacgggcacttttgctaaaccaaacaacaattttgatcaatatacacactccgtaatcacccggtgcaacgcacgggcacttttgcta

SEQ ID NO: 11252 - DNA, 255 bp, Oryza sativa
gccgtgccggtgagacgggagggagagggagcggtccaccgtcgctgccgcaccccacaccccgccgtcgcccgtgccgtgccagtgagacgggagggagagggggagagggagaggtccgccgttgccaccacaccccgccgtcacccgtgccgtgccggtgagacaggagggagagggggagagggagcgacgccgccgcccgccggaggggaggggaggagaagcggcgccggtggggagagggggaagggg

SEQ ID NO: 11253 - DNA, 101 bp, Oryza sativa
gatcgctaccatgcctgtactcagactaggtgtgtagtcgtacctcgaccattcgtagagaacttgtagaggtggtgggatagctaccatgcctgtactca

SEQ ID NO: 11254 - DNA, 99 bp, Oryza sativa
aaatttaatatttcccccttcaatggccacctggatttgctgtctagaaaccttgtcagccatttgtagaatgagaaatttaatatttcccccttcatt

SEQ ID NO: 11255 - DNA, 181 bp, Oryza sativa
cgcatcgccttcagatggccgatattgttatatcgccattagttgttttaattgtaaccggttgtggtttgccgatgtacaatggtcgatattgttatatcgcccttagttgtttttcatattgtaatcggctgtgttttgccgatgtacaatggccgatattgttatatcgcccttagtt

SEQ ID NO: 11256 - DNA, 90 bp, Oryza sativa
ttaactatatctacctgaacatattcctgtctagccaaatgttattacattttgggatggaaatgttaactatatctacctgaacatttt

SEQ ID NO: 11257 - DNA, 83 bp, Oryza sativa
tcgagggcgttgctgatgaagaagcaccccagttaatgatatggctcgcttctctggctcgagggcgttgcggatgaagaagc

SEQ ID NO: 11258 - DNA, 100 bp, Oryza sativa
tttggagtaatgacttgtagttgacatgaacctgtgacaacaaactgatgttagaagcatgtgagcttttggagtaatgactcgtagttgacatgaacct

SEQ ID NO: 11259 - DNA, 101 bp, Oryza sativa
agggagtaggaaacacagactaatgcaaggatgtgttctatcgtagtacgaggttggccttttttttttacgaagggagtaggaaacacatactaatgcaa

SEQ ID NO: 11260 - DNA, 95 bp, Oryza sativa
tggcataggtacgcacctacgtacgtgggtatgtacgcttcccctcccttttttcatttttccttggcataggtacgcacctacgtacgtgggta

SEQ ID NO: 11261 - DNA, 84 bp, Oryza sativa
gctcgaattcagaacttgccaaaactgaaagccttcaacagggacccggccatcgagctcgaattcaaaacttgccaaaactga

SEQ ID NO: 11262 - DNA, 96 bp, Oryza sativa
cgcctacccctgcgccatgtggcgctttatgggttttttactgtgctgttcggatgatgggattttaccgttacgcctacccttgcgccatgtggc

SEQ ID NO: 11263 - DNA, 95 bp, Oryza sativa
taagttgaataatccagaacttggattcacgtatggactgagagtgttagtagatgctattaagttgaataatccagaatttggattcacgtatg

SEQ ID NO: 11264 - DNA, 104 bp, Oryza sativa
aatcgggactaaagattatttttagtcccggttaaaaactttttgatctttagtccccagttgatgttaccaatcgggactaaagatcatttttagtcccggtt

SEQ ID NO: 11265 - DNA, 106 bp, Oryza sativa
aggtggcgttggccgaggcccaataaattaaggttgattcatcattcatgggcattgatatatccggcctaggtggcgttggccgaagcccaataaattaaggttg

SEQ ID NO: 11266 - DNA, 115 bp, Oryza sativa
ctaaacgccttgcggtaatatggagtcgccaaaaatcgtgatggcaactttttgtgacaagtcgacaagcatgatcgcagcacctaaacgccttgcggtgatatggagtcgccaa

SEQ ID NO: 11267 - DNA, 81 bp, Oryza sativa
aggccgccgcgccgccgtccgctgccgagagcgctgccgcagtcgcttgccgaggccgctgcagacgcgccgtcgtccgct

SEQ ID NO: 11268 - DNA, 99 bp, Oryza sativa
aaatactagcaggacataaaatgctttttgcctgacaattctgttttatgcgtacattgtgtgaactggcaagaaaatactagcaggatataaaatgct

SEQ ID NO: 11269 - DNA, 78 bp, Oryza sativa
ttcatcatgtgttgttcttgttcatctgttgatgtgcgttgatgtgggatttgttcatcatttgttgttcttgttcat

SEQ ID NO: 11270 - DNA, 120 bp, Oryza sativa
ttttattactgtgagatgtgcactttcgtttatttatacatggtgcattaatgaatttagtaaatagatgaaatgtggttcgttttattactgtgagatgtgcaatttcgtttatttata

SEQ ID NO: 11271 - DNA, 128 bp, Oryza sativa
ggagtgagtatataataacttttctcggagtgagtatatactgatttcttcttagaatgagtatatagactgattttttttctcagaactcaaaacaagttcatggaatgagtatatactgatttctt

SEQ ID NO: 11272 - DNA, 80 bp, Oryza sativa
cctccctccctcttcttctcagatctgcccggaggagtaggctaccggcggcggcggttcccttccctcttcctctcaga

SEQ ID NO: 11273 - DNA, 133 bp, Oryza sativa
tttgtgataaatgaaaatattaaatctgcagttttgtgaaacaagttcttaaatctgtagttttgtgatatattgtgcataatacttgtagttctgtgataaacgaagatattaaatctgtagttttgtgaaa

SEQ ID NO: 11274 - DNA, 79 bp, Oryza sativa
ttagtggagtacttaacccacaaggtagcgttgaagcttttacacagtgaactatattagtggagcacttaacccacaa

SEQ ID NO: 11275 - DNA, 88 bp, Oryza sativa
taacaatcattagttggatatagtaaattatattctaggtttcgattttagtaaatgtcccttgtaacaatcattagttggatataat

SEQ ID NO: 11276 - DNA, 109 bp, Oryza sativa
cttagatgattaatctatgatccaaattatcttcctcatttttcttctcttattaagttatatcacctcaattatttttagcacttagatgattaatctatgatccaaa

SEQ ID NO: 11277 - DNA, 100 bp, Oryza sativa
agataacacaattaactttttagatatttatcgtaagataaccaagtactatgtaaaaactactacctctgtttttaagataacaccattaactttttag

SEQ ID NO: 11278 - DNA, 104 bp, Oryza sativa
gttttgctggtggaggccgactccttcccctttgctggtagagggcgactgcgcagtggcaggatgttttgctggtggaggccgactccttccccttgctggtg

SEQ ID NO: 11279 - DNA, 101 bp, Oryza sativa
tttcccggtcggtcacccatccctaaattgctctaggcttgtcctcactcgtgcgcactcgggaagaatttcctggtcggtcacccatccctaaattgctc

SEQ ID NO: 11280 - DNA, 105 bp, Oryza sativa
aaccattttatgatatttagtctcggttggtaacaccaattaggactaaaaatcatctttagcctctattgggaagcccataaccattttatgatctttagtctc

SEQ ID NO: 11281 - DNA, 100 bp, Oryza sativa
taaatatatattttgagcaaacatctgaaaatatttgaaaattcaagaataaattgatatagtaaacattaaatatattttttgagcaaacatctgaaaa

SEQ ID NO: 11282 - DNA, 231 bp, Oryza sativa
ctaaagatgatctttagtcccggttcaaaagggtaacgggcatatttgatctttagtcccggtttgtgttaccaaccaggactaaagatcatctttagtcccggttcgaatgctgtcaggtcatgtcaggcccccccggaatctttaccaaccgggactaaagtcgtactttagtcccggttggtaataccaaccgggactaaagatcccggtgatctttagccccggttg

SEQ ID NO: 11283 - DNA, 84 bp, Oryza sativa
tttctaagatgccttattaatattttgagtcattttttaatagattcttaatttctagatgtttctaagatgccttattaacat

SEQ ID NO: 11284 - DNA, 94 bp, Oryza sativa
cgggactaaagattatttttagtcctggttaaaaactttttgatctttagtcctagttgatgttatcaatcgggactaaagatcatttttagtc

SEQ ID NO: 11285 - DNA, 83 bp, Oryza sativa
gagggtattattgtttaggaaaaaatataccgcacttaacggtagtataatcgtagagggtattattgttcaggaaaaaatat

SEQ ID NO: 11286 - DNA, 76 bp, Oryza sativa
aaactttcctaaagataaaaggaaaacataaagtccttataggacactaaacacactttcctaaagataaaaggaa

SEQ ID NO: 11287 - DNA, 145 bp, Oryza sativa
cacggccgaacggcttcatcggcctttcatcgtacacgagtgaagacgtcctcggccgaacggcttcatcggctggtcgtcatccatggccgaacctcgttgtcggcctttcgttcgtcgtccacgaccgaagctcgtcgtcggc

SEQ ID NO: 11288 - DNA, 102 bp, Oryza sativa
tagcattggcagtacaaaatcgtctccgatatttaatatcattggcagtacaagtggtataactttccgatatttaatatcattggcagtacaaaatcgtct

SEQ ID NO: 11289 - DNA, 89 bp, Oryza sativa
gcagacataaataatgaggcataagtaatggagaaaaaaacagagacatgctcattctattcctgcgcagacataaataataaggcata

SEQ ID NO: 11290 - DNA, 89 bp, Oryza sativa
tgtcgtcaagactgtttccagggattcggcacccattattttgctcacatcgaatacgtcattgtcgtcaagactgtttccaaggattc

SEQ ID NO: 11291 - DNA, 71 bp, Oryza sativa
tactggttattgattcttgaaccgataagtactacgtgatcctcaatgtactggttagtgattcttgaacc

SEQ ID NO: 11292 - DNA, 87 bp, Oryza sativa
gggtccaccaatttaataaaaatcaaccatacatatatatctaatctaatagtctaaaataacgggtccaccaattaaataaaaatc

SEQ ID NO: 11293 - DNA, 75 bp, Oryza sativa
gggtccacgaatttaataaaaatcagatgtaatctaaatatctaaaatagtgggtccatcaattaaatgaaaatc

SEQ ID NO: 11294 - DNA, 83 bp, Oryza sativa
attttattagtcataatacattttcggatagtaaatgatttcaaatggaaatatgttcaaattttgttagtcataatacattt

SEQ ID NO: 11295 - DNA, 75 bp, Oryza sativa
tttccttttatctttaggaaagtgtgtttaatgtcttataaggactttatgttttccttttatctttaggaaagt

SEQ ID NO: 11296 - DNA, 105 bp, Oryza sativa; identical to SEQ ID NO: 10776

SEQ ID NO: 11297 - DNA, 105 bp, Oryza sativa; identical to SEQ ID NO: 10777

SEQ ID NO: 11298 - DNA, 423 bp, Homo sapiens
tgtacaaaaaagcaggctttaaaggaaccaattcagtcgactggatccggtaccaaggtcgggcaggaagagggcctatttcccatgattccttcatatttgcatatacgatacaaggctgttagagagataattagaattaatttgactgtaaacacaaagatattagtacaaaatacgtgacgtagaaagtaataatttcttgggtagtttgcagttttaaaattatgttttaaaatggactatcatatgcttaccgtaacttgaaagtatttcgatttcttggctttatatatcttgtggaaaggacgaaacaccaatctttggtaagtcacttaaacacttagtttcatcctacaaaatgttacagaacaggtatcaaatctttggtaagtcacttaaacacttagtttcatctttttt

SEQ ID NO: 11299 - DNA, 423 bp, Homo sapiens
tgtacaaaaaagcaggctttaaaggaaccaattcagtcgactggatccggtaccaaggtcgggcaggaagagggcctatttcccatgattccttcatatttgcatatacgatacaaggctgttagagagataattagaattaatttgactgtaaacacaaagatattagtacaaaatacgtgacgtagaaagtaataatttcttgggtagtttgcagttttaaaattatgttttaaaatggactatcatatgcttaccgtaacttgaaagtatttcgatttcttggctttatatatcttgtggaaaggacgaaacaccgatgaaactaagtgtttaagtgacttaccaaagatttgatacctgttctgtaacattttgtaggatgaaactaagtgtttaagtgacttaccaaagatttttttt

SEQ ID NO: 11300 - DNA, 418 bp, Homo sapiens
tgtacaaaaaagcaggctttaaaggaaccaattcagtcgactggatccggtaccaaggtcgggcaggaagagggcctatttcccatgattccttcatatttgcatatacgatacaaggctgttagagagataattagaattaatttgactgtaaacacaaagatattagtacaaaatacgtgacgtagaaagtaataatttcttgggtagtttgcagttttaaaattatgttttaaaatggactatcatatgcttaccgtaacttgaaagtatttcgatttcttggctttatatatcttgtggaaaggacgaaacaccacaggaagcatggctcaaggagatttagaggcttaattggctcatggttctgcaggaagcacagttgtacaggaagcatggctcaaggagattttttttt

SEQ ID NO: 11301 - DNA, 418 bp, Homo sapiens
tgtacaaaaaagcaggctttaaaggaaccaattcagtcgactggatccggtaccaaggtcgggcaggaagagggcctatttcccatgattccttcatatttgcatatacgatacaaggctgttagagagataattagaattaatttgactgtaaacacaaagatattagtacaaaatacgtgacgtagaaagtaataatttcttgggtagtttgcagttttaaaattatgttttaaaatggactatcatatgcttaccgtaacttgaaagtatttcgatttcttggctttatatatcttgtggaaaggacgaaacaccaaatctccttgagccatgcttcctgtacaactgtgcttcctgcagaaccatgagccaattaagcctctaaatctccttgagccatgcttcctgttttttt

SEQ ID NO: 11302 - DNA, 431 bp, Homo sapiens
tgtacaaaaaagcaggctttaaaggaaccaattcagtcgactggatccggtaccaaggtcgggcaggaagagggcctatttcccatgattccttcatatttgcatatacgatacaaggctgttagagagataattagaattaatttgactgtaaacacaaagatattagtacaaaatacgtgacgtagaaagtaataatttcttgggtagtttgcagttttaaaattatgttttaaaatggactatcatatgcttaccgtaacttgaaagtatttcgatttcttggctttatatatcttgtggaaaggacgaaacaccaattaactaaagacatcgctagctaatagtgaggcttcccacctataatctaagcataatatgttaatttagctaatgcaattaactaaagacatcgctagctaatatttttt

SEQ ID NO: 11303 - DNA, 431 bp, Homo sapiens
tgtacaaaaaagcaggctttaaaggaaccaattcagtcgactggatccggtaccaaggtcgggcaggaagagggcctatttcccatgattccttcatatttgcatatacgatacaaggctgttagagagataattagaattaatttgactgtaaacacaaagatattagtacaaaatacgtgacgtagaaagtaataatttcttgggtagtttgcagttttaaaattatgttttaaaatggactatcatatgcttaccgtaacttgaaagtatttcgatttcttggctttatatatcttgtggaaaggacgaaacacctattagctagcgatgtctttagttaattgcattagctaaattaacatattatgcttagattataggtgggaagcctcactattagctagcgatgtctttagttaatttttttt

SEQ ID NO: 11304 - DNA, 403 bp, Homo sapiens
tgtacaaaaaagcaggctttaaaggaaccaattcagtcgactggatccggtaccaaggtcgggcaggaagagggcctatttcccatgattccttcatatttgcatatacgatacaaggctgttagagagataattagaattaatttgactgtaaacacaaagatattagtacaaaatacgtgacgtagaaagtaataatttcttgggtagtttgcagttttaaaattatgttttaaaatggactatcatatgcttaccgtaacttgaaagtatttcgatttcttggctttatatatcttgtggaaaggacgaaacacccagctaatttttgtatttttggtagctgggattacaggcatgagccaccacgtccagctaatttttgtatttttagtagtttttt

SEQ ID NO: 11305 - DNA, 403 bp, Homo sapiens
tgtacaaaaaagcaggctttaaaggaaccaattcagtcgactggatccggtaccaaggtcgggcaggaagagggcctatttcccatgattccttcatatttgcatatacgatacaaggctgttagagagataattagaattaatttgactgtaaacacaaagatattagtacaaaatacgtgacgtagaaagtaataatttcttgggtagtttgcagttttaaaattatgttttaaaatggactatcatatgcttaccgtaacttgaaagtatttcgatttcttggctttatatatcttgtggaaaggacgaaacaccctactaaaaatacaaaaattagctggacgtggtggctcatgcctgtaatcccagctaccaaaaatacaaaaattagctgtttttt

SEQ ID NO: 11306 - DNA, 398 bp, Homo sapiens
tgtacaaaaaagcaggctttaaaggaaccaattcagtcgactggatccggtaccaaggtcgggcaggaagagggcctatttcccatgattccttcatatttgcatatacgatacaaggctgttagagagataattagaattaatttgactgtaaacacaaagatattagtacaaaatacgtgacgtagaaagtaataatttcttgggtagtttgcagttttaaaattatgttttaaaatggactatcatatgcttaccgtaacttgaaagtatttcgatttcttggctttatatatcttgtggaaaggacgaaacaccgtctctactaaaaatacaaaaattaccatcctggctaacacggtgaaaccccgtctctactaaaaatacaaaaatttttt

SEQ ID NO: 11307 - DNA, 398 bp, Homo sapiens
tgtacaaaaaagcaggctttaaaggaaccaattcagtcgactggatccggtaccaaggtcgggcaggaagagggcctatttcccatgattccttcatatttgcatatacgatacaaggctgttagagagataattagaattaatttgactgtaaacacaaagatattagtacaaaatacgtgacgtagaaagtaataatttcttgggtagtttgcagttttaaaattatgttttaaaatggactatcatatgcttaccgtaacttgaaagtatttcgatttcttggctttatatatcttgtggaaaggacgaaacacctttttgtatttttagtagagacggggtttcaccgtgttagccaggatggtaatttttgtatttttagtagagactttttt

SEQ ID NO: 11308 - DNA, 404 bp, Homo sapiens
tgtacaaaaaagcaggctttaaaggaaccaattcagtcgactggatccggtaccaaggtcgggcaggaagagggcctatttcccatgattccttcatatttgcatatacgatacaaggctgttagagagataattagaattaatttgactgtaaacacaaagatattagtacaaaatacgtgacgtagaaagtaataatttcttgggtagtttgcagttttaaaattatgttttaaaatggactatcatatgcttaccgtaacttgaaagtatttcgatttcttggctttatatatcttgtggaaaggacgaaacaccgaaaccccgtctctactaaaaaaatacaaaaaaaattagccgggcatggtcacacaatgaaaccccgtctctactaaaaatttttt

SEQ ID NO: 11309 - DNA, 404 bp, Homo sapiens
tgtacaaaaaagcaggctttaaaggaaccaattcagtcgactggatccggtaccaaggtcgggcaggaagagggcctatttcccatgattccttcatatttgcatatacgatacaaggctgttagagagataattagaattaatttgactgtaaacacaaagatattagtacaaaatacgtgacgtagaaagtaataatttcttgggtagtttgcagttttaaaattatgttttaaaatggactatcatatgcttaccgtaacttgaaagtatttcgatttcttggctttatatatcttgtggaaaggacgaaacacctttttagtagagacggggtttcattgtgtgaccatgcccggctaattttttttgtatttttttagtagagacggggtttctttttt

1. Eukaryotic expression vector comprising a eukaryotic CRISPR, preferably a mammalian or a plant CRISPR.

2. The eukaryotic expression vector of claim 1, wherein the CRISPR is one of the CRISPR sequences of SEQ ID NO: 1-SEQ ID NO: 11297.

3. The eukaryotic expression vector of claim 1, wherein the mammalian CRISPR is a human CRISPR and wherein said CRISPR sequence is one of the sequences of SEQ ID NO: 1-10141.

4. The eukaryotic expression vector of claim 1, wherein the CRISPR is under control of an endogenous promoter.

5. The eukaryotic expression vector of claim 1, wherein the CRISPR is under control of a heterologous promoter.

6. Method of assaying the effect of a eukaryotic CRISPR on the gene regulation of a eukaryotic cell comprising the steps of:
a. transforming or transfecting said cell with a eukaryotic expression vector of claim 1;
b. allowing the CRISPR to be transcribed;
c. measuring the transcriptome of said cell.

7. The method of claim 6, wherein said CRISPR is a human CRISPR and said cell is a human cell.

8. The method of claim 6 in which the effect on gene regulation is measured by comparing the total RNA of the cell before and after expression of the CRISPR.

9. Method of assaying the transcription of a eukaryotic CRISPR comprising the steps of:
a. transforming or transfecting a cell with a eukaryotic expression vector of claim 4;
b. subjecting said cell to a stimulus;
c. measuring the transcriptome of said cell.

10. The method of claim 9, wherein said stimulus is a chemical stimulus.

11. The method of claim 9, wherein said stimulus is a physical stimulus.

12-13. (canceled)

14. A kit comprising the vector of claim 1 and instructions for performing a method to study gene regulation in eukaryotes.

15. The kit of claim 14, wherein the eukaryotes are mammals.

16. The kit of claim 14, wherein the eukaryotes are humans.
